(19) United States
(12) Patent Application Publication
(10) Pub. No.: US 2011/0275787 A1
(43) Pub. Date: Nov. 10, 2011

(54) CROSS-SPECIES-SPECIFIC SINGLE DOMAIN BISPECIFIC SINGLE CHAIN ANTIBODY

(75) Inventors: Peter Kufer, Munich (DE); Tobias Raum, Munich (DE)

(73) Assignee: Microment AG

(21) Appl. No.: 13/122,280

(22) PCT Filed: Oct. 1, 2009
(86) PCT No.: PCT/EP09/62795

§ 371 Date: Jul. 15, 2011

Related U.S. Application Data
(60) Provisional application No. 61/101,935, filed on Oct. 1, 2008.

(51) Int. Cl. C07K 16/18; C07K 14/435

(52) U.S. Cl. 530/324; 530/387.9; 530/387.3

(57) ABSTRACT

The present invention relates to a bispecific single chain antibody molecule comprising a first binding domain consisting of one antibody variable domain capable of binding to an epitope of the human and non-chimpanzee primate CD3 epsilon chain, wherein the epitope is part of an amino acid sequence comprised in the group consisting of SEQ ID NOs. 2, 4, 6, and 8, and a second binding domain capable of binding to an epitope of a human and a non-chimpanzee primate tumor target antigen. The invention further relates to a bispecific single chain antibody molecule comprising a first binding domain capable of binding to an epitope of human and non-chimpanzee primate CD3ε (epsilon) chain, wherein the epitope is part of an amino acid sequence comprised in the group consisting of SEQ ID NOs. 2, 4, 6, and 8, and a second binding domain consisting of one antibody variable domain capable of binding to an epitope of a human and a non-chimpanzee primate tumor target antigen. The invention also provides nucleic acids encoding said bispecific single chain antibody molecule as well as vectors and host cells and a process for its production. The invention further relates to pharmaceutical compositions comprising said bispecific single chain antibody molecule and medical uses of said bispecific single chain antibody molecule.

[0001] The present invention relates to a bispecific single chain antibody molecule comprising a first binding domain consisting of one antibody variable domain capable of binding to an epitope of the human and non-chimpanzee primate CD3 epsilon chain, wherein the epitope is part of an amino acid sequence comprised in the group consisting of SEQ ID NOs. 2, 4, 6, and 8, and a second binding domain capable of binding to an epitope of a human and a non-chimpanzee primate tumor target antigen. The invention further relates to a bispecific single chain antibody molecule comprising a first binding domain capable of binding to an epitope of human and non-chimpanzee primate CD3ε (epsilon) chain, wherein the epitope is part of an amino acid sequence comprised in the group consisting of SEQ ID NOs. 2, 4, 6, and 8, and a second binding domain consisting of one antibody variable domain capable of binding to an epitope of a human and a non-chimpanzee primate tumor target antigen. The invention also provides nucleic acids encoding said bispecific single chain antibody molecule as well as vectors and host cells and a process for its production. The invention further relates to pharmaceutical compositions comprising said bispecific single chain antibody molecule and medical uses of said bispecific single chain antibody molecule.

[0002] T cell recognition is mediated by clonotypically distributed alpha beta and gamma delta T cell receptors (TcR) that interact with the peptide-loaded molecules of the peptide MHC (pMHC) (Davis & Bjorkman, Nature 334 (1988), 395-402). The antigen-specific chains of the TcR do not possess signalling domains but instead are coupled to the conserved multisubunit signalling apparatus CD3 (Call, Cell 111 (2002), 967-979, Alarcon, Immunol. Rev. 191 (2003), 38-46, Malissen Immunol. Rev. 191 (2003), 7-27). The mechanism by which TcR ligation is directly communicated to the signalling apparatus remains a fundamental question in T cell biology (Alarcon, loc. cit.; Davis, Cell 110 (2002), 285-287). It seems clear that sustained T cell responses involve coreceptor engagement, TcR oligomerization, and a higher order arrangement of TcR-pMHC complexes in the immunological synapse (Davis & van der Merwe, Curr. Biol. 11 (2001), R289-R291, Davis, Nat. Immunol. 4 (2003), 217-224). However very early TcR signalling occurs in the absence of these events and may involve a ligand-induced conformational change in CD3 epsilon (Alarcon, loc. cit., Davis (2002), loc. cit., Gil, J. Biol. Chem. 276 (2001), 11174-11179, Gil, Cell 109 (2002), 901-912). The epsilon, gamma, delta and zeta subunits of the signalling complex associate with each other to form a CD3 epsilon-gamma heterodimer, a CD3 epsilon-delta heterodimer, and a CD3 zeta-zeta homodimer (Call, loc. cit.). Various studies have revealed that the CD3 molecules are important for the proper cell surface expression of the alpha beta TcR and normal T cell development (Berkhout, J. Biol. Chem. 263 (1988), 8528-8536, Wang, J. Exp. Med. 188 (1998), 1375-1380, Kappes, Curr. Opin. Immunol. 7 (1995), 441-447). The solution structure of the ectodomain fragments of the mouse CD3 epsilon gamma heterodimer showed that the epsilon gamma subunits are both C2-set Ig domains that interact with each other to form an unusual side-to-side dimer configuration (Sun, Cell 105 (2001), 913-923). Although the cysteine-rich stalk appears to play an important role in driving CD3 dimerization (Su, loc. cit., Borroto, J. Biol. Chem. 273 (1998), 12807-12816), interaction by means of the extracellular domains of CD3 epsilon and CD3 gamma is sufficient for assembly of these proteins with TcR beta (Manolios, Eur. J. Immunol. 24 (1994), 84-92, Manolios & Li, Immunol. Cell Biol. 73 (1995), 532-536). Although still controversial, the dominant stoichiometry of the TcR most likely comprises one alpha beta TcR, one CD3 epsilon gamma heterodimer, one CD3 epsilon delta heterodimer and one CD3 zeta zeta homodimer (Call, loc. cit.). Given the central role of the human CD3 epsilon gamma heterodimer in the immune response, the crystal structure of this complex bound to the therapeutic antibody OKT3 has recently been elucidated (Kjer-Nielsen, PNAS 101, (2004), 7675-7680).

[0003] A number of therapeutic strategies modulate T cell immunity by targeting TcR signalling, particularly the anti-human CD3 monoclonal antibodies (mAbs) that are widely used clinically in immunosuppressive regimes. The CD3-specific mouse mAb OKT3 was the first mAb licensed for use in humans (Sgro, Toxicology 105 (1995), 23-29) and is widely used clinically as an immunosuppressive agent in transplantation (Chatenoud, Clin. Transplant 7 (1993), 422-430, Chatenoud, Nat. Rev. Immunol. 3 (2003), 123-132, Kumar, Transplant. Proc. 30 (1998), 1351-1352), type 1 diabetes (Chatenoud (2003), loc. cit.), and psoriasis (Utset, J. Rheumatol. 29 (2002), 1907-1913). Moreover, anti-CD3 mAbs can induce partial T cell signalling and clonal anergy (Smith, J. Exp. Med. 185 (1997), 1413-1422). OKT3 has been described in the literature as a potent T cell mitogen (Van Wauve, J. Immunol. 124 (1980), 2708-18) as well as a potent T cell killer (Wong, Transplantation 50 (1990), 683-9). OKT3 exhibits both of these activities in a time-dependent fashion; following early activation of T cells leading to cytokine release, upon further administration OKT3 later blocks all known T cell functions. It is due to this later blocking of T cell function that OKT3 has found such wide application as an immunosuppressant in therapy regimens for reduction or even abolition of allograft tissue rejection.

[0004] OKT3 reverses allograft tissue rejection most probably by blocking the function of all T cells, which play a major role in acute rejection. OKT3 reacts with and blocks the function of the CD3 complex in the membrane of human T cells, which is associated with the antigen recognition structure of T cells (TCR) and is essential for signal transduction. Which subunit of the TCR/CD3 is bound by OKT3 has been the subject of multiple studies. Though some evidence has pointed to a specificity of OKT3 for the epsilon-subunit of the TCR/CD3 complex (Tunnacliffe, Int. Immunol. 1 (1989), 546-50; Kjer-Nielsen, PNAS 101, (2004), 7675-7680). Further evidence has shown that OKT3 binding of the TCR/CD3 complex requires other subunits of this complex to be present (Salmeron, J. Immunol. 147 (1991), 3047-52).

[0005] Other well known antibodies specific for the CD3 molecule are listed in Tunnacliffe, Int. Immunol. 1 (1989), 546-50. As indicated above, such CD3 specific antibodies are able to induce various T cell responses such as lymphokine production (Von Wussow, J. Immunol. 127 (1981), 1197; Palacious, J. Immunol. 128 (1982), 337), proliferation (Van Wauve, J. Immunol. 124 (1980), 2708-18) and suppressor-T cell induction (Kunicka, in “Lymphocyte Typing II” 1 (1986), 223). That is, depending on the experimental conditions, CD3 specific monoclonal antibody can either inhibit or induce cytotoxicity (Leewenberg, J. Immunol. 134 (1985), 3770; Phillips, J. Immunol. 136 (1986) 1579; Platsoucas, Proc. Natl. Acad. Sci. USA 78 (1981), 4500; Itoh, Cell. Immunol. 108 (1987), 283-96; Mentzer, J. Immunol. 135 (1985), 34; Landegren, J. Exp. Med. 155 (1982), 1579; Choi (2001), Eur. J. Immunol. 31, 94-106; Xu (2000), Cell Immunol. 200, 16-26; Kimball (1995), Transpl. Immunol. 3, 212-221). Although many of the CD3 antibodies described in the art have been reported to recognize the CD3 epsilon subunit of the CD3 complex, most of them bind in fact to conformational epitopes and, thus, only recognize CD3 epsilon in the native context of the TCR. Conformational epitopes are characterized by the presence of two or more discrete amino acid residues which are separated in the primary sequence, but come together on the surface of the molecule when the polypeptide folds into the native protein/antigen (Sela, (1969) Science 166, 1365 and Laver, (1990) Cell 61, 553-6). The conformational epitopes bound by CD3 epsilon antibodies described in the art may be separated in two groups. In the major group, said epitopes are being formed by two CD3 subunits, e.g. of the CD3 epsilon chain and the CD3 gamma or CD3 delta chain. For example, it has been found in several studies that the most widely used CD3 epsilon monoclonal antibodies OKT3, WT31, UCHT1, 7D6 and Leu-4 did not bind to cells singly transfected with the CD3-epsilon chain. However, these antibodies stained cells doubly transfected with a combination of CD3 epsilon plus either CD3 gamma or CD3 delta (Tunnacliffe, loc. cit.; Law, Int. Immunol. 14 (2002), 389-400; Salmeron, J. Immunol. 147 (1991), 3047-52; Coulie, Eur. J. Immunol. 21 (1991), 1703-9). In a second smaller group, the conformational epitope is being formed within the CD3 epsilon subunit itself. A member of this group is for instance mAb APA 1/1 which has been raised against denatured CD3 epsilon (Risueno, Blood 106 (2005), 601-8). Taken together, most of the CD3 epsilon antibodies described in the art recognize conformational epitopes located on two or more subunits of CD3. The discrete amino acid residues forming the three-dimensional structure of these epitopes may hereby be located either on the CD3 epsilon subunit itself or on the CD3 epsilon subunit and other CD3 subunits such as CD3 gamma or CD3 delta.

[0006] Another problem with respect to CD3 antibodies is that many CD3 antibodies have been found to be species-specific. Anti-CD3 monoclonal antibodies—as holds true generally for any other monoclonal antibodies—function by way of highly specific recognition of their target molecules. They recognize only a single site, or epitope, on their target CD3 molecule. For example, one of the most widely used and best characterized monoclonal antibodies specific for the CD3 complex is OKT-3. This antibody reacts with chimpanzee CD3 but not with the CD3 homolog of other primates, such as macaques, or with dog CD3 (Sandusky et al., J. Med. Primatol. 15 (1986), 441-451). Similarly, WO2005/118635 or WO2007/033230 describe human monoclonal CD3 epsilon antibodies which react with human CD3 epsilon but not with CD3 epsilon of mouse, rat, rabbit, or non-chimpanzee primates, such as rhesus monkey, cynomolgus monkey or baboon monkey. The anti-CD3 monoclonal antibody UCHT-1 is also reactive with CD3 from chimpanzee but not with CD3 from macaques (own data). On the other hand, there are also examples of monoclonal antibodies, which recognize macaque antigens, but not their human counterparts. One example of this group is monoclonal antibody FN-18 directed to CD3 from macaques (Uda et al., J. Med. Primatol. 30 (2001), 141-147). Interestingly, it has been found that peripheral lymphocytes from about 12% of cynomolgus monkeys lacked reactivity with anti-rhesus monkey CD3 monoclonal antibody (FN-18) due to a polymorphism of the CD3 antigen in macaques. Uda et al. described a substitution of two amino acids in the CD3 sequence of cynomolgus monkeys, which are not reactive with FN-18 antibodies, as compared to CD3 derived from animals, which are reactive with FN-18 antibodies (Uda et al., J Med Primatol. 32 (2003), 105-10; Uda et al., J Med Primatol. 33 (2004), 34-7).

[0007] The discriminatory ability, i.e. the species specificity, inherent not only to CD3 monoclonal antibodies (and fragments thereof), but to monoclonal antibodies in general, is a significant impediment to their development as therapeutic agents for the treatment of human diseases. In order to obtain market approval any new candidate medication must pass through rigorous testing. This testing can be subdivided into preclinical and clinical phases: Whereas the latter—further subdivided into the generally known clinical phases I, II and III—is performed in human patients, the former is performed in animals. The aim of pre-clinical testing is to prove that the drug candidate has the desired activity and most importantly is safe. Only when the safety in animals and possible effectiveness of the drug candidate has been established in preclinical testing this drug candidate will be approved for clinical testing in humans by the respective regulatory authority. Drug candidates can be tested for safety in animals in the following three ways, (i) in a relevant species, i.e. a species where the drug candidates can recognize the ortholog antigens, (ii) in a transgenic animal containing the human antigens and (iii) by use of a surrogate for the drug candidate that can bind the ortholog antigens present in the animal. Limitations of transgenic animals are that this technology is typically limited to rodents. Between rodents and man there are significant differences in the physiology and the safety results cannot be easily extrapolated to humans. The limitations of a surrogate for the drug candidate are the different composition of matter compared to the actual drug candidate and often the animals used are rodents with the limitation as discussed above. Therefore, preclinical data generated in rodents are of limited predictive power with respect to the drug candidate. The approach of choice for safety testing is the use of a relevant species, preferably a lower primate. The limitation now of monoclonal antibodies suitable for therapeutic intervention in man described in the art is that the relevant species are higher primates, in particular chimpanzees. Chimpanzees are considered as endangered species and due to their human-like nature, the use of such animals for drug safety testing has been banned in Europe and is highly restricted elsewhere. CD3 has also been successfully used as a target for bispecific single chain antibodies in order to redirect cytotoxic T cells to pathological cells, resulting in the depletion of the diseased cells from the respective organism (WO 99/54440; WO 04/106380). For example, Bargou et al. (Science 321 (2008): 974-7) have recently reported on the clinical activity of a CD19×CD3 bispecific antibody construct called blinatumomab, which has the potential to engage all cytotoxic T cells in human patients for lysis of cancer cells. Doses as low as 0.005 milligrams per square meter per day in non-Hodgkin's lymphoma patients led to an elimination of target cells in blood. Partial and complete tumor regressions were first observed at a dose level of 0.015 milligrams, and all seven patients treated at a dose level of 0.06 milligrams experienced a tumor regression. Blinatumomab also led to clearance of tumor cells from bone marrow and liver. Though this study established clincical proof of concept for the therapeutic potency of the bispecific single chain antibody format in treating blood-cell derived cancer, there is still need for successful concepts for therapies of other cancer types.

[0008] In the event that a bispecific antibody is intended for therapeutic use, it is desirable to produce high amounts of this antibody solubly and in the desired functional form. The production of functionally active antibody becomes especially critical when producing bispecific antibodies of which one portion is able to activate and recruit the cytotoxic potential of human immune effector cells. For example, a produced antibody devoid of functional activity will not lead to the desired activation of human immune effector cells, while a bispecific antibody which is functionally active, albeit not in the desired manner, as for example may be the case when the bispecific antibody is produced in a heterogeneous form containing multiple isomers, may activate and recruit the cytotoxic potential of human immune effector cells in unforeseeable and/or unintended manners.

[0009] One example of the sort of unintended activation mentioned above is the possibility of activation of human immune effector cells to exert an effect on other human immune effector cells instead of on a target cell intended for destruction. This type of immune effector cell fratricide may jeopardize the effectiveness of a regimen of therapy depending on the activity of human immune effector cells.

[0010] However, reliable production of large amounts of functional single chain antibody, especially large amounts of functional bispecific single chain antibody, from prokaryotic expression systems such as E. coli is often limited, necessitating costly optimization (Baneyx 1999. Curr Op in Biotechnol 10, 411-21).

[0011] In summary, bispecific antibody constructs can be of great therapeutic use in redirecting the powerful potential of the body's own immune system to achieve the destruction of diseased cells. By the same token, however, the activation of such a powerful means of eradicating or neutralizing unwanted cells requires that this power be controlled as precisely as possible so that the cytotoxic potential of the immune system is recruited and applied only in the direction intended and no other.

[0012] Clearly, when one specific binding arm of a bispecific single chain antibody is to recruit the activity of a human immune effector cell, for example a cytotoxic T cell, there exists an especially heightened and, as yet, unmet need for bispecific single chain antibodies which overcome limitations as described above.

[0013] The present invention provides a bispecific single chain antibody molecule comprising a first binding domain consisting of one antibody variable domain capable of binding to an epitope of the human and non-chimpanzee primate CD3ε (epsilon) chain, wherein the epitope is part of an amino acid sequence comprised in the group consisting of SEQ ID NOs. 2, 4, 6, and 8, and a second binding domain capable of binding to an epitope of a human and a non-chimpanzee primate tumor target antigen.

[0014] Furthermore, the present invention relates to a bispecific single chain antibody molecule comprising a first binding domain capable of binding to an epitope of human and non-chimpanzee primate CD3ε (epsilon) chain, wherein the epitope is part of an amino acid sequence comprised in the group consisting of SEQ ID NOs. 2, 4, 6, and 8, and a second binding domain consisting of one antibody variable domain capable of binding to an epitope of a human and a non-chimpanzee primate tumor target antigen.

[0015] According to another embodiment of the invention, the first binding domain of the bispecific antibody comprises one antibody variable domain, preferably a VHH domain.

[0016] According to one embodiment of the invention, the first binding domain of the bispecific antibody comprises two antibody variable domains, preferably a scFv, i.e. VH-VL or VL-VH.

[0017] According to another embodiment of the invention, the second binding domain of the bispecific antibody comprises one antibody variable domain, preferably a VHH domain.

[0018] According to one embodiment of the invention, the second binding domain of the bispecific antibody comprises two antibody variable domains, preferably a scFv, i.e. VH-VL or VL-VH.

[0019] In its minimal form, the total number of antibody variable regions in the bispecific antibody according to the invention is thus only two. For example, such an antibody could comprise two VH or two VHH domains. Here, not two variable domains VH and VL (a scFv) but rather only one variable domain is necessary to specifically bind to each antigen of interest. The bispecific antibody of the invention is thus approximately half the size of conventional bispecific single chain antibodies containing four antibody variable domains.

[0020] The greater simplicity in molecular design of the bispecific antibody of the invention correlates to greater possible simplicity in the host expression system used for its production in functionally active form. As such, the small size of the inventive bispecific antibody opens up avenues of production hitherto closed to conventional bispecific single chain antibodies with four antibody variable domains. For example, the bispecific antibody of the invention may be easily produced in conventional, well understood and cheap bacterial expression systems such as E. coli in amounts which are desired for therapeutic applications. Moreover, the bispecific antibody of the invention is more stable than conventional antibodies.

[0021] Though T cell-engaging bispecific single chain antibodies described in the art have great therapeutic potential for the treatment of malignant diseases, most of these bispecific molecules are limited in that they are species specific and recognize only human antigen, and—due to genetic similarity—likely the chimpanzee counterpart. The advantage of the present invention is the provision of a bispecific single chain antibody comprising a binding domain exhibiting cross-species specificity to human and non-chimpanzee primate of the CD3 epsilon chain.

[0022] In the present invention, an N-terminal 1-27 amino acid residue polypeptide fragment of the extracellular domain of CD3 epsilon was surprisingly identified which—in contrast to all other known epitopes of CD3 epsilon described in the art—maintains its three-dimensional structural integrity when taken out of its native environment in the CD3 complex (and optionally fused to a heterologous amino acid sequence such as EpCAM or an immunoglobulin Fc part).

[0023] The present invention, therefore, provides for a bispecific single chain antibody molecule comprising a first binding domain capable of binding to an epitope of an N-terminal 1-27 amino acid residue polypeptide fragment of the extracellular domain of CD3 epsilon (which CD3 epsilon is, for example, taken out of its native environment and/or comprised by (presented on the surface of) a T-cell) of human and at least one non-chimpanzee primate CD3 epsilon chain, wherein the epitope is part of an amino acid sequence comprised in the group consisting of SEQ ID NOs. 2, 4, 6, and 8; and a second binding domain capable of binding to prostate-specific membrane antigen (PSMA). Preferred non-chimpanzee primates are mentioned herein elsewhere. At least one (or a selection thereof or all) primate(s) selected from Callithrix jacchus; Saguinus oedipus, Saimiri sciureus, and Macaca fascicularis (either SEQ ID 427 or 428 or both), is (are) particularly preferred. Macaca mulatta, also known as Rhesus Monkey is also envisaged as another preferred primate. It is thus envisaged that antibodies of the invention bind to (are capable of binding to) the context independent epitope of an N-terminal 1-27 amino acid residue polypeptide fragment of the extracellular domain of CD3 epsilon of human and Callithrix jacchus, Saguinus oedipus, Saimiri sciureus, and Macaca fascicularis (either SEQ ID 427 or 428 or both), and optionally also to Macaca mulatta. A bispecific single chain antibody molecule comprising a first binding domain as defined herein can be obtained (is obtainable by) or can be manufactured in accordance with the protocol set out in the appended Examples (in particular Example 2). To this end, it is envisaged to (a) immunize mice with an N-terminal 1-27 amino acid residue polypeptide fragment of the extracellular domain of CD3 epsilon of human and/or Saimiri sciureus; (b) generation of an immune murine antibody scFv library; (c) identification of CD3 epsilon specific binders by testing the capability to bind to at least SEQ ID NOs. 2, 4, 6, and 8.

[0024] The context-independence of the CD3 epitope provided in this invention corresponds to the first 27 N-terminal amino acids of CD3 epsilon or functional fragments of this 27 amino acid stretch. The phrase “context-independent,” as used herein in relation to the CD3 epitope means that binding of the herein described inventive binding molecules/antibody molecules does not lead to a change or modification of the conformation, sequence, or structure surrounding the antigenic determinant or epitope. In contrast, the CD3 epitope recognized by a conventional CD3 binding molecule (e.g. as disclosed in WO 99/54440 or WO 04/106380) is localized on the CD3 epsilon chain C-terminally to the N-terminal 1-27 amino acids of the context-independent epitope, where it only takes the correct conformation if it is embedded within the rest of the epsilon chain and held in the right sterical position by heterodimerization of the epsilon chain with either the CD3 gamma or delta chain. Anti-CD3 binding molecules as part of a bispecific single chain antibody molecule as provided herein and generated (and directed) against a context-independent CD3 epitope provide for a surprising clinical improvement with regard to T cell redistribution and, thus, a more favourable safety profile. Without being bound by theory, since the CD3 epitope is context-independent, forming an autonomous selfsufficient subdomain without much influence on the rest of the CD3 complex, the CD3 binding molecules provided herein induce less allosteric changes in CD3 conformation than the conventional CD3 binding molecules, which recognize context-dependent CD3 epitopes (e.g. as disclosed in WO 99/54440 or WO 04/106380).

[0025] The context-independence of the CD3 epitope which is recognized by the CD3 binding domain of the bispecific single chain antibody of the invention is associated with less or no T cell redistribution (T cell redistribution equates with an initial episode of drop and subsequent recovery of absolute T cell counts) during the starting phase of treatment with said bispecific single chain antibody of the invention. This results in a better safety profile of the bispecific single chain antibody of the invention compared to conventional CD3 binding molecules known in the art, which recognize context-dependent CD3 epitopes. Particularly, because T cell redistribution during the starting phase of treatment with CD3 binding molecules is a major risk factor for adverse events, like CNS adverse events, the bispecific single chain antibody of the invention has a substantial safety advantage over the CD3 binding molecules known in the art by recognizing a context-independent rather than a context-dependent CD3 epitope. Patients with such CNS adverse events related to T cell redistribution during the starting phase of treatment with conventional CD3 binding molecules usually suffer from confusion and disorientation, in some cases also from urinary incontinence. Confusion is a change in mental status in which the patient is not able to think with his or her usual level of clarity. The patient usually has difficulties to concentrate and thinking is not only blurred and unclear but often significantly slowed down. Patients with CNS adverse events related to T cell redistribution during the starting phase of treatment with conventional CD3 binding molecules may also suffer from loss of memory. Frequently, the confusion leads to the loss of ability to recognize people, places, time or dates. Feelings of disorientation are common in confusion, and the decision-making ability is impaired. CNS adverse events related to T cell redistribution during the starting phase of treatment with conventional CD3 binding molecules may further comprise blurred speech and/or word finding difficulties. This disorder may impair both, the expression and understanding of language as well as reading and writing. Besides urinary incontinence, vertigo and dizziness may also accompany CNS adverse events related to T cell redistribution during the starting phase of treatment with conventional CD3 binding molecules in some patients.

[0026] The maintenance of the three-dimensional structure within the mentioned 27 amino acid N-terminal polypeptide fragment of CD3 epsilon can be used for the generation of, preferably human, binding domains which are capable of binding to the N-terminal CD3 epsilon polypeptide fragment in vitro and to the native (CD3 epsilon subunit of the) CD3 complex on T cells in vivo with the same binding affinity. These data strongly indicate that the N-terminal fragment as described herein forms a tertiary conformation, which is similar to its structure normally existing in vivo. A very sensitive test for the importance of the structural integrity of the amino acids 1-27 of the N-terminal polypeptide fragment of CD3 epsilon was performed. Individual amino acids of amino acids 1-27 of the N-terminal polypeptide fragment of CD3 epsilon were changed to alanine (alanine scanning) to test the sensitivity of the amino acids 1-27 of the N-terminal polypeptide fragment of CD3 epsilon for minor disruptions. The CD3 binding domains as part of the bispecific single chain antibody of the invention were used to test for binding to the alanine-mutants of amino acids 1-27 of the N-terminal polypeptide fragment of CD3 epsilon (see appended Example 5). Individual exchanges of the first five amino acid residues at the very N-terminal end of the fragment and two of the amino acids at positions 23 and 25 of the amino acids 1-27 of the N-terminal polypeptide fragment of CD3 epsilon were critical for binding of the antibody molecules. The substitution of amino acid residues in the region of position 1-5 comprising the residues Q (Glutamine at position 1), D (Aspartic acid at position 2), G (Glycine at position 3), N (Asparagine at position 4), and E (Glutamic acid at position 5) to Alanine abolished binding of the single domain bispecific single chain antibody of the invention to said fragment. While, for at least some of the single domain bispecific single chain antibody of the invention, two amino acid residues at the C-terminus of the mentioned fragment T (Threonine at position 23) and I (Isoleucine at position 25) reduced the binding energy to the single domain bispecific single chain antibody of the invention.

[0027] Unexpectedly, it has been found that the thus isolated bispecific single chain antibody of the invention not only recognizes the human N-terminal fragment of CD3 epsilon, but also the corresponding homologous fragments of CD3 epsilon of various primates, including New-World Monkeys (Marmoset, Callithrix jacchus; Saguinus oedipus; Saimiri sciureus) and Old-World Monkeys (Macaca fascicularis, also known as Cynomolgus Monkey; or Macaca mulatta, also known as Rhesus Monkey). Thus, multi-primate specificity of the bispecific single chain antibody of the invention was detected. The following sequence analyses confirmed that human and primates share a highly homologous sequence stretch at the N-terminus of the extracellular domain of CD3 epsilon.

[0028] The amino acid sequence of the aformentioned N-terminal fragments of CD3 epsilon are depicted in SEQ ID No. 2 (human), SEQ ID No. 4 (Callithrix jacchus); SEQ ID No. 6 (Saguinus oedipus); SEQ ID No. 8 (Saimiri sciureus); SEQ ID No. 427 QDGNEEMGSITQTPYQVSISGTTILTC or SEQ ID No. 428 QDGNEEMGSITQTPYQVSISGTTVILT (Macaca fascicularis, also known as Cynomolgus Monkey), and SEQ ID No. 429 QDGNEEMGSITQTPYHVSISGTTVILT (Macaca mulatta, also known as Rhesus Monkey).

[0029] The second binding domain of the single domain bispecific single chain antibody of the invention binds to a human or a non-chimpanzee primate tumor target antigen; more preferred it binds to the human tumor target antigen and a non-chimpanzee primate tumor target antigen and therefore is cross-species specific; even more preferred to the human tumor target antigen and the macaque tumor target antigen (and therefore is cross-species specific as well). Particularly preferred, the macaque target antigen is the Cynomolgus monkey tumor target antigen and/or the Rhesus monkey tumor target antigen. However, it is not excluded from the scope of the present invention, that the second binding domain may also bind to tumor target antigen homologs of other species, such as to the tumor target antigen homolog in rodents. Preferably, the tumor target antigen bound by the second binding domain of the bispecific antibody of the invention is EGFR, CD44v6 or CD30.

[0030] EGFR (also known as c-erb1 or HER1) belongs to the erbB receptor tyrosine kinase family. When activated by binding of a ligand from the EGF family of growth factors, EGFR homodimerizes or heterodimerizes with a second EGFR or another member of the erbB receptor family, respectively, initiating a signaling cascade through mitogen-activated protein kinases and other transcription factors leading to proliferation, differentiation and repair (Olayioye, EMBO J. 19 (2000), 3159-67). EGFR is overexpressed in many epithelial cancers, including colorectal, breast, lung, and head and neck cancers (Mendelsohn, J. Clin. Oncol. 21 (2003), 2787-99; Mendelsohn, J. Clin. Oncol. 20 (18, Suppl.) (2002), 1S-13S; Prewett, Clin. Cancer Res. 8 (2002), 994-1003). Overexpression and/or mutation of EGFR in malignant cells leads to constitutive activation of kinase activity resulting in proliferation, angiogenesis, invasion, metastasis, and inhibition of apoptosis (Mendelsohn (2003, loc. cit.; Ciardiello, Clin. Cancer Res. 7 (2001), 2958-70; Perez-Soler, Oncologist 9 (2004), 58-67). Monoclonal antibodies that target the extracellular ligand binding domain or the intracellular tyrosine kinase signaling cascade of EGFR have been shown efficacy as antitumor target (Laskin, Cancer Treat. Review 30 (2004), 1-17). For example, cetuximab (Erbitux) a humanized monoclonal antibody to EGFR, which competitively inhibits the extracellular domain of EGFR to inhibit ligand activation of the receptor, was approved by the Food and Drug Administration (FDA) in 2004 for the treatment of metastatic colon cancer in combination with the topoisomerase inhibitor irinotecan.

[0031] CD30 (also known as Tumor necrosis factor receptor superfamily member 8 (TNFRSF8) or Lymphoid activation antigen) is expressed by activated, but not by resting, B or T cells. In the absence of CD30 signaling, activated lymphoid cells which are not eliminated via CD95-stimulation (apoptosis) gain the ability to proliferate extensively upon secondary encounter with antigen on parenchymal tissues, such as the pancreatic islets. Thus, CD30 signaling is understood to limit the proliferative potential of autoreactive CD8 effector T cells, and protects the body against autoimmunity. The cDNA of CD30 was cloned by Durkop et al. (Cell 68 (3), 421-427 (1992) GenBank Accession No: NM_{—}001243). CD30 interacts with TRAF2 and TRAF5 and mediate the activation of nuclear factor kappa-B. Several chronic inflammatory skin diseases are associated with increased numbers of mast cells and increased expression of CD30. Moreover, the lymphoid activation antigen CD30 is expressed on the H-RS cells of classical Hodgkin's lyphoma. Currently, clinical investigations are focusing on two anti-CD30 monoclonal antibodies, the humanized SGN-30 monoclonal antibody and the fully human 5F11 monoclonal antibody. SGN-30, a chimeric anti-CD30 monoclonal antibody, has demonstrated antitumor activity in preclinical models of Hodgkin's lymphoma and anaplastic large cell lymphoma. MDX-060 is a fully human IgG1k monoclonal antibody that recognizes CD30 and mediates killing of Hodgkin's lymphoma and anaplastic large cell lymphoma cell lines in vitro and in xenograft tumor models (Klimm et al. Hematologica (2005) 90 (12):1680).

[0032] CD44 is also known as IN, LHR, MC56, MDU2, MDU3, MIC4, Pgp1, CDW44, CSPG8, HCELL, MUTCH-I, ECMR-III or MGC10468. Accession numbers can be found in GenBank under e.g. NM_{—}000610. The human CD44 gene encodes type 1 transmembrane glycoproteins involved in cell-cell and cell-matrix interactions. The structural heterogeneity of the gene products is caused primarily by alternative splicing of at least 10 out of 20 exons. Certain CD44 variant isoforms, in particular those containing CD44 variant domain 6 (CD44v6), have been implicated in tumourigenesis, tumour cell invasion and metastasis. CD44v6 expression in human malignancies (primary epithelial and nonepithelial tumours as well as metastases) and normal tissues, and several examples of the clinical use of CD44v6-specific antibodies are reviewed in Heider et al. (Cancer Immunology, Immunotherapy (2004) 53(7):567-79). In nonmalignant tissues, CD44v6 expression is essentially restricted to a subset of epithelia. Intense and homogeneous expression of CD44v6 was reported for the majority of squamous cell carcinomas and a proportion of adenocarcinomas of differing origin, but was rarely seen in nonepithelial tumours. This expression pattern has made CD44v6 an attractive target for antibody-guided therapy of various types of epithelium-derived cancers.

[0033] Advantageously, the present invention provides also single domain bispecific single chain antibodies comprising a second binding domain which binds both to the human tumor target antigen and to the macaque tumor target antigen homolog, i.e. the homolog of a non-chimpanzee primate. In a preferred embodiment, the bispecific single chain antibody thus comprises a second binding domain exhibiting cross-species specificity to the human and a non-chimpanzee primate tumor target antigen. In this case, the identical bispecific single chain antibody molecule can be used both for preclinical evaluation of safety, activity and/or pharmacokinetic profile of these binding domains in primates and as drugs in humans. Put in other words, the same molecule can be used in preclinical animal studies as well as in clinical studies in humans. This leads to highly comparable results and a much-increased predictive power of the animal studies compared to species-specific surrogate molecules. Since both the CD3 and the second binding domain of the single domain bispecific single chain antibody of the invention are cross-species specific, i.e. reactive with the human and non-chimpanzee primates, it can be used both for preclinical evaluation of safety, activity and/or pharmacokinetic profile of these binding domains in primates and—in the identical form—as drugs in humans. It will be understood that in a preferred embodiment, the cross-species specificity of the first and second binding domain of the antibodies of the invention is identical.

[0034] It has been found in the present invention that it is possible to generate a single domain bispecific single chain antibody wherein the identical molecule can be used in preclinical animal testing, as well as clinical studies and even in therapy in human. This is due to the unexpected identification of the single domain bispecific single chain antibody, which, in addition to binding to human CD3 epsilon and tumor target antigen, respectively, (and due to genetic similarity likely to the chimpanzee counterpart), also binds to the homologs of said antigens of non-chimpanzee primates, including New-World Monkeys and Old-World Monkeys. As shown in the following examples, said single domain bispecific single chain antibody of the invention can be used as therapeutic agent or drug against various diseases, including, but not limited, to cancer. The single domain bispecific single chain antibody is particularly advantageous for the therapy of cancer. In view of the above, the need to construct a surrogate single domain bispecific single chain antibody for testing in a phylogenetic distant (from humans) species disappears. As a result, the identical molecule can be used in animal preclinical testing as is intended to be administered to humans in clinical testing as well as following market approval and therapeutic drug administration. The ability to use the same molecule for preclinical animal testing as in later administration to humans virtually eliminates, or at least greatly reduces, the danger that the data obtained in preclinical animal testing have limited applicability to the human case. In short, obtaining preclinical safety data in animals using the same molecule as will actually be administered to humans does much to ensure the applicability of the data to a human-relevant scenario. In contrast, in conventional approaches using surrogate molecules, said surrogate molecules have to be molecularly adapted to the animal test system used for preclinical safety assessment. Thus, the molecule to be used in human therapy in fact differs in sequence and also likely in structure from the surrogate molecule used in preclinical testing in pharmacokinetic parameters and/or biological activity, with the consequence that data obtained in preclinical animal testing have limited applicability/transferability to the human case. The use of surrogate molecules requires the construction, production, purification and characterization of a completely new construct. This leads to additional development costs and time necessary to obtain that molecule. In sum, surrogates have to be developed separately in addition to the actual drug to be used in human therapy, so that two lines of development for two molecules have to be carried out. Therefore, a major advantage of the single domain bispecific single chain antibody of the invention exhibiting cross-species specificity described herein is that the identical molecule can be used for therapeutics in humans and in preclinical animal testing.

[0035] It is preferred that at least one of said first or second binding domains of the bispecific single chain antibody of the invention is CDR-grafted, humanized or human, as set forth in more detail below. Preferably, both the first and second binding domains of the bispecific single chain antibody of the invention are CDR-grafted, humanized or human. For the single domain bispecific single chain antibody of the invention, the generation of an immune reaction against said binding molecules is excluded to the maximum possible extent upon administration of the molecule to human patients.

[0036] Another major advantage of the single domain bispecific single chain antibody of the invention is its applicability for preclinical testing in various primates. The behavior of a drug candidate in animals should ideally be indicative of the expected behavior of this drug candidate upon administration to humans. As a result, the data obtained from such preclinical testing should therefore generally have a highly predictive power for the human case. However, as learned from the tragic outcome of the recent Phase I clinical trial on TGN1412 (a CD28 monoclonal antibody), a drug candidate may act differently in a primate species than in humans: Whereas in preclinical testing of said antibody no or only limited adverse effects have been observed in animal studies performed with cynomolgus monkeys, six human patients developed multiple organ failure upon administration of said antibody (Lancet 368 (2006), 2206-7). The results of these dramatic, non-desired negative events suggest that it may not be sufficient to limit preclinical testing to only one (non-chimpanzee primate) species. The fact that the single domain bispecific single chain antibody of the invention binds to a series of New-World and Old-World Monkeys may help to overcome the problems faced in the case mentioned above. Accordingly, the present invention provides means and methods for minimizing species differences in effects when drugs for human therapy are being developed and tested.

[0037] With the cross-species specific single domain bispecific single chain antibody of the invention it is also no longer necessary to adapt the test animal to the drug candidate intended for administration to humans, such as e.g. the creation of transgenic animals. The single domain bispecific single chain antibody of the invention exhibiting cross-species specificity according to the uses and the methods of invention can be directly used for preclinical testing in non-chimpanzee primates, without any genetic manipulation of the animals. As well known to those skilled in the art, approaches in which the test animal is adapted to the drug candidate always bear the risk that the results obtained in the preclinical safety testing are less representative and predictive for humans due to the modification of the animal. For example, in transgenic animals, the proteins encoded by the transgenes are often highly over-expressed. Thus, data obtained for the biological activity of an antibody against this protein antigen may be limited in their predictive value for humans in which the protein is expressed at much lower, more physiological levels.

[0038] A further advantage of the uses of the single domain bispecific single chain antibody of the invention exhibiting cross-species specificity is the fact that chimpanzees as an endangered species are avoided for animal testing. Chimpanzees are the closest relatives to humans and were recently grouped into the family of hominids based on the genome sequencing data (Wildman et al., PNAS 100 (2003), 7181). Therefore, data obtained with chimpanzee is generally considered to be highly predictive for humans. However, due to their status as endangered species, the number of chimpanzees, which can be used for medical experiments, is highly restricted. As stated above, maintenance of chimpanzees for animal testing is therefore both costly and ethically problematic. The uses of the single domain bispecific single chain antibody of the invention avoid both ethical objections and financial burden during preclinical testing without prejudicing the quality, i.e. applicability, of the animal testing data obtained. In light of this, the uses of the single domain bispecific single chain antibody of the invention provide for a reasonable alternative for studies in chimpanzees.

[0039] A further advantage of the single domain bispecific single chain antibody of the invention is the ability of extracting multiple blood samples when using it as part of animal preclinical testing, for example in the course of pharmacokinetic animal studies. Multiple blood extractions can be much more readily obtained with a non-chimpanzee primate than with lower animals, e.g. a mouse. The extraction of multiple blood samples allows continuous testing of blood parameters for the determination of the biological effects induced by the single domain bispecific single chain antibody of the invention. Furthermore, the extraction of multiple blood samples enables the researcher to evaluate the pharmacokinetic profile of the single domain bispecific single chain antibody of the invention as defined herein. In addition, potential side effects, which may be induced by said single domain bispecific single chain antibody of the invention reflected in blood parameters can be measured in different blood samples extracted during the course of the administration of said antibody. This allows the determination of the potential toxicity profile of the single domain bispecific single chain antibody of the invention as defined herein.

[0040] The advantages of the single domain bispecific single chain antibody of the invention as defined herein exhibiting cross-species specificity may be briefly summarized as follows:

First, the single domain bispecific single chain antibody of the invention as defined herein used in preclinical testing is the same as the one used in human therapy. Thus, it is no longer necessary to develop two independent molecules, which may differ in their pharmacokinetic properties and biological activity. This is highly advantageous in that e.g. the pharmacokinetic results are more directly transferable and applicable to the human setting than e.g. in conventional surrogate approaches.

[0041] Second, the uses of the single domain bispecific single chain antibody of the invention as defined herein for the preparation of therapeutics in human is less cost- and labor-intensive than surrogate approaches.

[0042] Third, the single domain bispecific single chain antibody of the invention as defined herein can be used for preclinical testing not only in one primate species, but in a series of different primate species, thereby limiting the risk of potential species differences between primates and human.

[0043] Fourth, chimpanzee as an endangered species for animal testing can be avoided if desired.

[0044] Fifth, multiple blood samples can be extracted for extensive pharmacokinetic studies. Sixth, due to the human origin of the binding molecules according to a preferred embodiment of the invention the generation of an immune reaction against said binding molecules is minimalized when administered to human patients. Induction of an immune response with antibodies specific for a drug candidate derived from a non-human species as e.g. a mouse leading to the development of human-anti-mouse antibodies (HAMAs) against therapeutic molecules of murine origin is excluded.

[0045] Last but not least, the therapeutic use of the single domain bispecific single chain antibody of the invention provides a novel and inventive therapeutic approach for cancer. The following examples clearly demonstrate the potent recruitment of cytotoxic activity of human and macaque effector cells against cells positive for a tumor target antigen.

[0046] As noted herein above, the present invention provides polypeptides, i.e. bispecific single chain antibodies, comprising a first binding domain consisting of one or two antibody variable domains capable of binding to an epitope of human and non-chimpanzee primate CD3ε chain and a second binding domain consisting of one or two antibody variable domains capable of binding to a tumor target antigen, wherein the second binding domain preferably also binds to a tumor target antigen of a human and a non-chimpanzee primate. The advantage of bispecific single chain antibody molecules as drug candidates fulfilling the requirements of the preferred bispecific single chain antibody of the invention is the use of such molecules in preclinical animal testing as well as in clinical studies and even for therapy in human. In a preferred embodiment of the cross-species specific bispecific single chain antibodies of the invention the second binding domain binding to a cell surface antigen is human. In a cross-species specific bispecific molecule according to the invention the binding domain binding to an epitope of human and non-chimpanzee primate CD3 epsilon chain is located in the order VH-VL or VL-VH or VHH or VH at the N-terminus or the C-terminus of the bispecific molecule. Examples for cross-species specific bispecific molecules according to the invention in different arrangements of the VH- and the VL-chain and the VHH chain consisting of one or two antibody variable domains in the first and the second binding domain are described in the appended examples.

[0047] As used herein, a “bispecific single chain antibody” denotes a single polypeptide chain comprising two binding domains. For example, each binding domain comprises one variable region from an antibody heavy chain (“VH region”), wherein the VH region of the first binding domain specifically binds to the CD3ε molecule, and the VH region of the second binding domain specifically binds to a tumor target antigen. Alternatively, each binding domain comprises one VHH region, wherein the VHH region of the first binding domain specifically binds to the CD3ε molecule, and the VHH region of the second binding domain specifically binds to a tumor target antigen. The two binding domains are optionally linked to one another by a short polypeptide spacer. A non-limiting example for a polypeptide spacer is Gly-Gly-Gly-Gly-Ser (G-G-G-G-S) and repeats thereof. Each binding domain may in addition to a VH region as described above comprise one variable region from an antibody light chain (“VL region”), the VH region and VL region within each of the first or second binding domains being linked to one another via a polypeptide linker, for example of the type disclosed and claimed in EP 623679 B1, but in any case long enough to allow the VH region and VL region of the first binding domain and the VH region and VL region of the second binding domain to pair with one another such that, together, they are able to specifically bind to the respective first and second binding domains. Preferred formats for the bispecific single chain antibody of the invention are for example VH tumor target antigen-VL tumor target antigen-VHH CD3 or VL tumor target antigen-VH tumor target antigen-VHH CD3 or VHH tumor target antigen-VH CD3-VL-CD3.

[0048] The term “protein” is well known in the art and describes biological compounds. Proteins comprise one or more amino acid chains (polypeptides), whereby the amino acids are bound among one another via a peptide bond. The term “polypeptide” as used herein describes a group of molecules, which consists of more than 30 amino acids. In accordance with the invention, the group of polypeptides comprises “proteins” as long as the proteins consist of a single polypeptide chain. Also in line with the definition the term “polypeptide” describes fragments of proteins as long as these fragments consist of more than 30 amino acids. Polypeptides may further form multimers such as dimers, trimers and higher oligomers, i.e. consisting of more than one polypeptide molecule. Polypeptide molecules forming such dimers, trimers etc. may be identical or non-identical. The corresponding higher order structures of such multimers are, consequently, termed homo- or heterodimers, homo- or heterotrimers etc. An example for a hereteromultimer is an antibody molecule, which, in its naturally occurring form, consists of two identical light polypeptide chains and two identical heavy polypeptide chains. The terms “polypeptide” and “protein” also refer to naturally modified polypeptides/proteins wherein the modification is effected e.g. by post-translational modifications like glycosylation, acetylation, phosphorylation and the like. Such modifications are well known in the art.

[0049] The term “binding domain” characterizes in connection with the present invention a domain of a polypeptide which specifically binds to/interacts with a given target structure/antigen/epitope. Thus, the binding domain is an “antigen-interaction-site”. The term “antigen-interaction-site” defines, in accordance with the present invention, a motif of a polypeptide, which is able to specifically interact with a specific antigen or tumor target antigen or a specific group of antigens, e.g. the identical antigen or tumor target antigen in different species. Said binding/interaction is also understood to define a “specific recognition”. The term “specifically recognizing” means in accordance with this invention that the antibody molecule is capable of specifically interacting with and/or binding to at least two, preferably at least three, more preferably at least four amino acids of an antigen, e.g. the human CD3 antigen as defined herein. Such binding may be exemplified by the specificity of a “lock-and-key-principle”. Thus, specific motifs in the amino acid sequence of the binding domain and the antigen bind to each other as a result of their primary, secondary or tertiary structure as well as the result of secondary modifications of said structure. The specific interaction of the antigen-interaction-site with its specific antigen may result as well in a simple binding of said site to the antigen. Moreover, the specific interaction of the binding domain/antigen-interaction-site with its specific antigen may alternatively result in the initiation of a signal, e.g. due to the induction of a change of the conformation of the antigen, an oligomerization of the antigen, etc. A preferred example of a binding domain in line with the present invention is an antibody. The binding domain may be a monoclonal or polyclonal antibody or derived from a monoclonal or polyclonal antibody.

[0050] The term “antibody” comprises derivatives or functional fragments thereof which still retain the binding specificity. Techniques for the production of antibodies are well known in the art and described, e.g. in Harlow and Lane “Antibodies, A Laboratory Manual”, Cold Spring Harbor Laboratory Press, 1988 and Harlow and Lane “Using Antibodies: A Laboratory Manual” Cold Spring Harbor Laboratory Press, 1999. The term “antibody” also comprises immunoglobulins (Ig's) of different classes (i.e. IgA, IgG, IgM, IgD and IgE) and subclasses (such as IgG1, IgG2 etc.).

[0051] The definition of the term “antibody” also includes embodiments such as chimeric, single chain and humanized antibodies, as well as antibody fragments, like, inter alia, Fab fragments. Antibody fragments or derivatives further comprise F(ab′)₂, Fv, scFv fragments or single domain antibodies, single variable domain antibodies or immunoglobulin single variable domain comprising merely one variable domain, which might be VH or VL, that specifically bind to an antigen or epitope independently of other V regions or domains; see, for example, Harlow and Lane (1988) and (1999), loc. cit. Such immunoglobulin single variable domain encompasses not only an isolated antibody single variable domain polypeptide, but also larger polypeptides that comprise one or more monomers of an antibody single variable domain polypeptide sequence.

[0052] Various procedures are known in the art and may be used for the production of such antibodies and/or fragments. Thus, the (antibody) derivatives can also be produced by peptidomimetics. Further, techniques described for the production of single chain antibodies (see, inter alia, U.S. Pat. No. 4,946,778) can be adapted to produce single chain antibodies specific for elected polypeptide(s). Also, transgenic animals may be used to express humanized antibodies specific for polypeptides and fusion proteins of this invention. For the preparation of monoclonal antibodies, any technique, providing antibodies produced by continuous cell line cultures can be used. Examples for such techniques include the hybridoma technique (Köhler and Milstein Nature 256 (1975), 495-497), the trioma technique, the human B-cell hybridoma technique (Kozbor, Immunology Today 4 (1983), 72) and the EBV-hybridoma technique to produce human monoclonal antibodies (Cole et al., Monoclonal Antibodies and Cancer Therapy, Alan R. Liss, Inc. (1985), 77-96). Surface plasmon resonance as employed in the BIAcore system can be used to increase the efficiency of phage antibodies which bind to an epitope of a target polypeptide, such as CD3 epsilon or a tumor target antigen (Schier, Human Antibodies Hybridomas 7 (1996), 97-105; Malmborg, J. Immunol. Methods 183 (1995), 7-13). It is also envisaged in the context of this invention that the term “antibody” comprises antibody constructs, which may be expressed in a host as described herein below, e.g. antibody constructs which may be transfected and/or transduced via, inter alia, viruses or plasmid vectors.

[0053] The term “specific interaction” as used in accordance with the present invention means that the binding domain does not or does not significantly cross-react with polypeptides which have similar structure as those bound by the binding domain, and which might be expressed by the same cells as the polypeptide of interest. Cross-reactivity of a panel of binding domains under investigation may be tested, for example, by assessing binding of said panel of binding domains under conventional conditions (see, e.g., Harlow and Lane, Antibodies: A Laboratory Manual, Cold Spring Harbor Laboratory Press, 1988 and Using Antibodies: A Laboratory Manual, Cold Spring Harbor Laboratory Press, 1999). Examples for the specific interaction of a binding domain with a specific antigen comprise the specificity of a ligand for its receptor. Said definition particularly comprises the interaction of ligands, which induce a signal upon binding to its specific receptor. Examples for said interaction, which is also particularly comprised by said definition, is the interaction of an antigenic determinant (epitope) with the binding domain (antigenic binding site) of an antibody.

[0054] The term “cross-species specificity” or “interspecies specificity” as used herein means binding of a binding domain described herein to the same target molecule in humans and non-chimpanzee primates. Thus, “cross-species specificity” or “interspecies specificity” is to be understood as an interspecies reactivity to the same molecule “X” (i.e. the homolog) expressed in different species, but not to a molecule other than “X”. Cross-species specificity of a monoclonal antibody recognizing e.g. human CD3 epsilon, to a non-chimpanzee primate CD3 epsilon, e.g. macaque CD3 epsilon, can be determined, for instance, by FACS analysis. The FACS analysis is carried out in a way that the respective monoclonal antibody is tested for binding to human and non-chimpanzee primate cells, e.g. macaque cells, expressing said human and non-chimpanzee primate CD3 epsilon antigens, respectively. An appropriate assay is shown in the following examples. The above-mentioned subject matter applies mutatis mutandis for the tumor target antigen: Cross-species specificity of a monoclonal antibody recognizing human tumor target antigen, to a non-chimpanzee primate tumor target antigen, e.g. macaque tumor target antigen, can be determined, for instance, by FACS analysis. The FACS analysis is carried out in a way that the respective monoclonal antibody is tested for binding to human and non-chimpanzee primate cells, e.g. macaque cells, expressing said human and non-chimpanzee primate tumor target antigens, respectively. Preferably, the tumor target antigen bound by the second binding domain of the bispecific antibody of the invention is EGFR, CD44v6 or CD30.

[0055] As used herein, CD3 epsilon denotes a molecule expressed as part of the T cell receptor and has the meaning as typically ascribed to it in the prior art. In human, it encompasses in individual or independently combined form all known CD3 subunits, for example CD3 epsilon, CD3 delta, CD3 gamma, CD3 zeta, CD3 alpha and CD3 beta. The non-chimpanzee primate, non-human CD3 antigens as referred to herein are, for example, Macaca fascicularis CD3 and Macaca mulatta CD3. In Macaca fascicularis, it encompasses CD3 epsilon FN-18 negative and CD3 epsilon FN-18 positive, CD3 gamma and CD3 delta. In Macaca mulatta, it encompasses CD3 epsilon, CD3 gamma and CD3 delta. Preferably, said CD3 as used herein is CD3 epsilon.

[0056] The human CD3 epsilon is indicated in GenBank Accession No. NM_{—}000733 and comprises SEQ ID NO. 1. The human CD3 gamma is indicated in GenBank Accession NO. NM_{—}000073. The human CD3 delta is indicated in GenBank Accession No. NM_{—}000732.

[0057] The CD3 epsilon “FN-18 negative” of Macaca fascicularis (i.e. CD3 epsilon not recognized by monoclonal antibody FN-18 due to a polymorphism as set forth above) is indicated in GenBank Accession No. AB073994.

[0058] The CD3 epsilon “FN-18 positive” of Macaca fascicularis (i.e. CD3 epsilon recognized by monoclonal antibody FN-18) is indicated in GenBank Accession No. AB073993. The CD3 gamma of Macaca fascicularis is indicated in GenBank Accession No. AB073992. The CD3 delta of Macaca fascicularis is indicated in GenBank Accession No. AB073991.

[0059] The nucleic acid sequences and amino acid sequences of the respective CD3 epsilon, gamma and delta homologs of Macaca mulatta can be identified and isolated by recombinant techniques described in the art (Sambrook et al. Molecular Cloning: A Laboratory Manual; Cold Spring Harbor Laboratory Press, 3^{rd} edition 2001). This applies mutatis mutandis to the CD3 epsilon, gamma and delta homologs of other non-chimpanzee primates as defined herein. The identification of the amino acid sequence of Callithrix jacchus, Saimiri sciureus and Saguinus oedipus is described in the appended examples. The amino acid sequence of the extracellular domain of the CD3 epsilon of Callithrix jacchus is depicted in SEQ ID NO: 3, the one of Saguinus oedipus is depicted in SEQ ID NO: 5 and the one of Saimiri sciureus is depicted in SEQ ID NO: 7.

[0060] The accession number of EGFR, CD44v6 and CD30 have been indicated above. On the basis of this sequence information it is possible for the person skilled in the art without any inventive ado to clone (and express) the macaque tumor target antigen. For example, the human EGFR cDNA or a fragment thereof indicated in the above-mentioned GenBank Accession No. can be used as a hybridization probe in order to screen a macaque cDNA library (e.g. a cDNA library of Cynomolgus monkey or Rhesus monkey) under appropriate hybridization conditions. Recombinant techniques and screening methods (including hybridization approaches) in molecular biology are described e.g. in Sambrook et al. Molecular Cloning: A Laboratory Manual; Cold Spring Harbor Laboratory Press, 3^{rd} edition 2001.

[0061] In line with the above, the term “epitope” defines an antigenic determinant, which is specifically bound/identified by a binding domain as defined herein. The binding domain may specifically bind to/interact with conformational or continuous epitopes, which are unique for the target structure, e.g. the human and non-chimpanzee primate CD3 epsilon chain or the human and non-chimpanzee primate tumor target antigen. A conformational or discontinuous epitope is characterized for polypeptide antigens by the presence of two or more discrete amino acid residues which are separated in the primary sequence, but come together on the surface of the molecule when the polypeptide folds into the native protein/antigen (Sela, (1969) Science 166, 1365 and Laver, (1990) Cell 61, 553-6). The two or more discrete amino acid residues contributing to the epitope are present on separate sections of one or more polypeptide chain(s). These residues come together on the surface of the molecule when the polypeptide chain(s) fold(s) into a three-dimensional structure to constitute the epitope. In contrast, a continuous or linear epitope consists of two or more discrete amino acid residues, which are present in a single linear segment of a polypeptide chain. Within the present invention, a “context-dependent” CD3 epitope refers to the conformation of said epitope. Such a context-dependent epitope, localized on the epsilon chain of CD3, can only develop its correct conformation if it is embedded within the rest of the epsilon chain and held in the right position by heterodimerization of the epsilon chain with either CD3 gamma or delta chain. In contrast, a context-independent CD3 epitope as provided herein refers to an N-terminal 1-27 amino acid residue polypeptide or a functional fragment thereof of CD3 epsilon. This N-terminal 1-27 amino acid residue polypeptide or a functional fragment thereof maintains its three-dimensional structural integrity and correct conformation when taken out of its native environment in the CD3 complex. The context-independency of the N-terminal 1-27 amino acid residue polypeptide or a functional fragment thereof, which is part of the extracellular domain of CD3 epsilon, represents, thus, an epitope which is completely different to the epitopes of CD3 epsilon described in connection with a method for the preparation of human binding molecules in WO 2004/106380. Said method used solely expressed recombinant CD3 epsilon. The conformation of this solely expressed recombinant CD3 epsilon differed from that adopted in its natural form, that is, the form in which the CD3 epsilon subunit of the TCR/CD3 complex exists as part of a noncovalent complex with either the CD3 delta or the CD3-gamma subunit of the TCR/CD3 complex. When such solely expressed recombinant CD3 epsilon protein is used as an antigen for selection of antibodies from an antibody library, antibodies specific for this antigen are identified from the library although such a library does not contain antibodies with specificity for self-antigens/autoantigens. This is due to the fact that solely expressed recombinant CD3 epsilon protein does not exist in vivo; it is not an autoantigen. Consequently, subpopulations of B cells expressing antibodies specific for this protein have not been depleted in vivo; an antibody library constructed from such B cells would contain genetic material for antibodies specific for solely expressed recombinant CD3 epsilon protein.

[0062] However, since the context-independent N-terminal 1-27 amino acid residue polypeptide or a functional fragment thereof is an epitope, which folds in its native form, binding domains in line with the present invention cannot be identified by methods based on the approach described in WO 2004/106380. Therefore, it could be verified in tests that binding molecules as disclosed in WO 2004/106380 are not capable of binding to the N-terminal 1-27 amino acid residues of the CD3 epsilon chain. Hence, conventional anti-CD3 binding molecules or anti-CD3 antibody molecules (e.g. as disclosed in WO 99/54440) bind CD3 epsilon chain at a position which is more C-terminally located than the context-independent N-terminal 1-27 amino acid residue polypeptide or a functional fragment provided herein. Prior art antibody molecules OKT3 and UCHT-1 have also a specificity for the epsilon-subunit of the TCR/CD3 complex between amino acid residues 35 to 85 and, accordingly, the epitope of these antibodies is also more C-terminally located. In addition, UCHT-1 binds to the CD3 epsilon chain in a region between amino acid residues 43 to 77 (Tunnacliffe, Int. Immunol. 1 (1989), 546-50; Kjer-Nielsen, PNAS 101, (2004), 7675-7680; Salmeron, J. Immunol. 147 (1991), 3047-52). Therefore, prior art anti-CD3 molecules do not bind to and are not directed against the herein defined context-independent N-terminal 1-27 amino acid residue epitope (or a functional fragment thereof). In particular, the state of the art fails to provide anti-CD3 molecules which specifically binds to the context-independent N-terminal 1-27 amino acid residue epitope and which are cross-species specific, i.e. bind to human and non-chimpanzee primate CD3 epsilon.

[0063] For the generation of a binding domain consisting of one or two antibody variable domains comprised in a bispecific single chain antibody molecule of the invention, e.g. monoclonal antibodies binding to both the human and non-chimpanzee primate CD3 epsilon (e.g. macaque CD3 epsilon) or monoclonal antibodies binding to the human and/or non-chimpanzee primate tumor target antigen can be used.

[0064] As used herein, “human” and “man” refers to the species Homo sapiens. As far as the medical uses of the constructs described herein are concerned, human patients are to be treated with the same molecule.

[0065] It is preferred that at least one of said first or second binding domains of the bispecific single chain antibody of the invention is CDR-grafted, humanized or human. Preferably, both the first and second binding domains of the bispecific single chain antibody of the invention are CDR-grafted, humanized or human.

[0066] The term “human” antibody as used herein is to be understood as meaning that the bispecific single chain antibody as defined herein, comprises (an) amino acid sequence(s) contained in the human germline antibody repertoire. For the purposes of definition herein, said bispecific single chain antibody may therefore be considered human if it consists of such (a) human germline amino acid sequence(s), i.e. if the amino acid sequence(s) of the bispecific single chain antibody in question is (are) identical to (an) expressed human germline amino acid sequence(s). A bispecific single chain antibody as defined herein may also be regarded as human if it consists of (a) sequence(s) that deviate(s) from its (their) closest human germline sequence(s) by no more than would be expected due to the imprint of somatic hypermutation. Additionally, the antibodies of many non-human mammals, for example rodents such as mice and rats, comprise VH CDR3 amino acid sequences which one may expect to exist in the expressed human antibody repertoire as well. Any such sequence(s) of human or non-human origin which may be expected to exist in the expressed human repertoire would also be considered “human” for the purposes of the present invention.

[0067] As used herein, the term “humanized”, “humanization”, “human-like” or grammatically related variants thereof are used interchangeably to refer to a bispecific single chain antibody comprising in at least one of its binding domains at least one complementarity determining region (“CDR”) from a non-human antibody or fragment thereof. Humanization approaches are described for example in WO 91/09968 and U.S. Pat. No. 6,407,213. As non-limiting examples, the term encompasses the case in which a variable region of at least one binding domain comprises a single CDR region, for example the third CDR region of the VH(CDRH3), from another non-human animal, for example a rodent, as well as the case in which a or both variable region/s comprise at each of their respective first, second and third CDRs the CDRs from said non-human animal. In the event that all CDRs of a binding domain of the bispecific single chain antibody have been replaced by their corresponding equivalents from, for example, a rodent, one typically speaks of “CDR-grafting”, and this term is to be understood as being encompassed by the term “humanized” or grammatically related variants thereof as used herein. The term “humanized” or grammatically related variants thereof also encompasses cases in which, in addition to replacement of one or more CDR regions within a VH and/or VL of the first and/or second binding domain further mutation/s (e.g. substitutions) of at least one single amino acid residue/s within the framework (“FR”) regions between the CDRs has/have been effected such that the amino acids at that/those positions correspond/s to the amino acid/s at that/those position/s in the animal from which the CDR regions used for replacement is/are derived. As is known in the art, such individual mutations are often made in the framework regions following CDR-grafting in order to restore the original binding affinity of the non-human antibody used as a CDR-donor for its target molecule. The term “humanized” may further encompass (an) amino acid substitution(s) in the CDR regions from a non-human animal to the amino acid(s) of a corresponding CDR region from a human antibody, in addition to the amino acid substitutions in the framework regions as described above.

[0068] As used herein, the term “homolog” or “homology” is to be understood as follows: Homology among proteins and DNA is often concluded on the basis of sequence similarity, especially in bioinformatics. For example, in general, if two or more genes have highly similar DNA sequences, it is likely that they are homologous. But sequence similarity may arise from different ancestors: short sequences may be similar by chance, and sequences may be similar because both were selected to bind to a particular protein, such as a transcription factor. Such sequences are similar but not homologous. Sequence regions that are homologous are also called conserved. This is not to be confused with conservation in amino acid sequences in which the amino acid at a specific position has changed but the physio-chemical properties of the amino acid remain unchanged. Homologous sequences are of two types: orthologous and paralogous. Homologous sequences are orthologous if they were separated by a speciation event: when a species diverges into two separate species, the divergent copies of a single gene in the resulting species are said to be orthologous. Orthologs, or orthologous genes, are genes in different species that are similar to each other because they originated from a common ancestor. The strongest evidence that two similar genes are orthologous is the result of a phylogenetic analysis of the gene lineage. Genes that are found within one clade are orthologs, descended from a common ancestor. Orthologs often, but not always, have the same function. Orthologous sequences provide useful information in taxonomic classification studies of organisms. The pattern of genetic divergence can be used to trace the relatedness of organisms. Two organisms that are very closely related are likely to display very similar DNA sequences between two orthologs. Conversely, an organism that is further removed evolutionarily from another organism is likely to display a greater divergence in the sequence of the orthologs being studied. Homologous sequences are paralogous if they were separated by a gene duplication event: if a gene in an organism is duplicated to occupy two different positions in the same genome, then the two copies are paralogous. A set of sequences that are paralogous are called paralogs of each other. Paralogs typically have the same or similar function, but sometimes do not: due to lack of the original selective pressure upon one copy of the duplicated gene, this copy is free to mutate and acquire new functions. An example can be found in rodents such as rats and mice. Rodents have a pair of paralogous insulin genes, although it is unclear if any divergence in function has occurred. Paralogous genes often belong to the same species, but this is not necessary: for example, the hemoglobin gene of humans and the myoglobin gene of chimpanzees are paralogs. This is a common problem in bioinformatics: when genomes of different species have been sequenced and homologous genes have been found, one can not immediately conclude that these genes have the same or similar function, as they could be paralogs whose function has diverged.

[0069] As used herein, a “non-chimpanzee primate” or “non-chimp primate” or grammatical variants thereof refers to any primate animal (i.e. not human) other than chimpanzee, i.e. other than an animal of belonging to the genus Pan, and including the species Pan paniscus and Pan troglodytes, also known as Anthropopithecus troglodytes or Simia satyrus. It will be understood, however, that it is possible that the antibodies of the invention can also bind with their first and/or second binding domain to the respective epitopes/fragments etc. of said chimpanzees. The intention is merely to avoid animal tests which are carried out with chimpanzees, if desired. It is thus also envisaged that in another embodiment the antibodies of the present invention also bind with their first and/or second binding domain to the respective epitopes of chimpanzees. A “primate”, “primate species”, “primates” or grammatical variants thereof denote/s an order of eutherian mammals divided into the two suborders of prosimians and anthropoids and comprising apes, monkeys and lemurs. Specifically, “primates” as used herein comprises the suborder Strepsirrhini (non-tarsier prosimians), including the infraorder Lemuriformes (itself including the superfamilies Chemogaleoidea and Lemuroidea), the infraorder Chiromyiformes (itself including the family Daubentoniidae) and the infraorder Lorisiformes (itself including the families Lorisidae and Galagidae). “Primates” as used herein also comprises the suborder Haplorrhini, including the infraorder Tarsiiformes (itself including the family Tarsiidae), the infraorder Simiiformes (itself including the Platyrrhini, or New-World monkeys, and the Catarrhini, including the Cercopithecidea, or Old-World Monkeys).

[0070] The non-chimpanzee primate species may be understood within the meaning of the invention to be a lemur, a tarsier, a gibbon, a marmoset (belonging to New-World Monkeys of the family Cebidae) or an Old-World Monkey (belonging to the superfamily Cercopithecoidea).

[0071] As used herein, an “Old-World Monkey” comprises any monkey falling in the superfamily Cercopithecoidea, itself subdivided into the families: the Cercopithecinae, which are mainly African but include the diverse genus of macaques which are Asian and North African; and the Colobinae, which include most of the Asian genera but also the African colobus monkeys.

[0072] Specifically, within the subfamily Cercopithecinae, an advantageous non-chimpanzee primate may be from the Tribe Cercopithecini, within the genus Allenopithecus (Allen's Swamp Monkey, Allenopithecus nigroviridis); within the genus Miopithecus (Angolan Talapoin, Miopithecus talapoin; Gabon Talapoin, Miopithecus ogouensis); within the genus Erythrocebus (Patas Monkey, Erythrocebus patas); within the genus Chlorocebus (Green Monkey, Chlorocebus sabaceus; Grivet, Chlorocebus aethiops; Bale Mountains Vervet, Chlorocebus djamdjamensis; Tantalus Monkey, Chlorocebus tantalus; Vervet Monkey, Chlorocebus pygerythrus; Malbrouck, Chlorocebus cynosuros); or within the genus Cercopithecus (Dryas Monkey or Salongo Monkey, Cercopithecus dryas; Diana Monkey, Cercopithecus diana; Roloway Monkey, Cercopithecus roloway; Greater Spot-nosed Monkey, Cercopithecus nictitans; Blue Monkey, Cercopithecus mitis; Silver Monkey, Cercopithecus doggetti; Golden Monkey, Cercopithecus kandti; Sykes's Monkey, Cercopithecus albogularis; Mona Monkey, Cercopithecus mona; Campbell's Mona Monkey, Cercopithecus campbelli; Lowe's Mona Monkey, Cercopithecus lowei; Crested Mona Monkey, Cercopithecus pogonias; Wolfs Mona Monkey, Cercopithecus wolfi; Dent's Mona Monkey, Cercopithecus denti; Lesser Spot-nosed Monkey, Cercopithecus petaurista; White-throated Guenon, Cercopithecus erythrogaster; Sclater's Guenon, Cercopithecus sclateri; Red-eared Guenon, Cercopithecus erythrotis; Moustached Guenon, Cercopithecus cephus; Red-tailed Monkey, Cercopithecus ascanius; L'Hoest's Monkey, Cercopithecus lhoesti; Preuss's Monkey, Cercopithecus preussi; Sun-tailed Monkey, Cercopithecus solatus; Hamlyn's Monkey or Owl-faced Monkey, Cercopithecus hamlyni; De Brazza's Monkey, Cercopithecus neglectus).

[0073] Alternatively, an advantageous non-chimpanzee primate, also within the subfamily Cercopithecinae but within the Tribe Papionini, may be from within the genus Macaca (Barbary Macaque, Macaca sylvanus; Lion-tailed Macaque, Macaca silenus; Southern Pig-tailed Macaque or Beruk, Macaca nemestrina; Northern Pig-tailed Macaque, Macaca leonina; Pagai Island Macaque or Bokkoi, Macaca pagensis; Siberut Macaque, Macaca siberu; Moor Macaque, Macaca maura; Booted Macaque, Macaca ochreata; Tonkean Macaque, Macaca tonkeana; Heck's Macaque, Macaca hecki; Gorontalo Macaque, Macaca nigriscens; Celebes Crested Macaque or Black “Ape”, Macaca nigra; Cynomolgus monkey or Crab-eating Macaque or Long-tailed Macaque or Kera, Macaca fascicularis; Stump-tailed Macaque or Bear Macaque, Macaca arctoides; Rhesus Macaque, Macaca mulatta; Formosan Rock Macaque, Macaca cyclopis; Japanese Macaque, Macaca fuscata; Toque Macaque, Macaca sinica; Bonnet Macaque, Macaca radiata; Barbary Macaque, Macaca sylvanmus; Assam Macaque, Macaca assamensis; Tibetan Macaque or Milne-Edwards' Macaque, Macaca thibetana; Arunachal Macaque or Munzala, Macaca munzala); within the genus Lophocebus (Gray-cheeked Mangabey, Lophocebus albigena; Lophocebus albigena albigena; Lophocebus albigena osmani; Lophocebus albigena johnstoni; Black Crested Mangabey, Lophocebus aterrimus; Opdenbosch's Mangabey, Lophocebus opdenboschi; Highland Mangabey, Lophocebus kipunji); within the genus Papio (Hamadryas Baboon, Papio hamadryas; Guinea Baboon, Papio papio; Olive Baboon, Papio anubis; Yellow Baboon, Papio cynocephalus; Chacma Baboon, Papio ursinus); within the genus Theropithecus (Gelada, Theropithecus gelada); within the genus Cercocebus (Sooty Mangabey, Cercocebus atys; Cercocebus atys atys; Cercocebus atys lunulatus; Collared Mangabey, Cercocebus torquatus; Agile Mangabey, Cercocebus agilis; Golden-bellied Mangabey, Cercocebus chrysogaster; Tana River Mangabey, Cercocebus galeritus; Sanje Mangabey, Cercocebus sanjei); or within the genus Mandrillus (Mandrill, Mandrillus sphinx; Drill, Mandrillus leucophaeus).

[0074] Most preferred is Macaca fascicularis (also known as Cynomolgus monkey and, therefore, in the Examples named “Cynomolgus”) and Macaca mulatta (rhesus monkey, named “rhesus”).

[0075] Within the subfamily Colobinae, an advantageous non-chimpanzee primate may be from the African group, within the genus Colobus (Black Colobus, Colobus satanas; Angola Colobus, Colobus angolensis; King Colobus, Colobus polykomos; Ursine Colobus, Colobus vellerosus; Mantled Guereza, Colobus guereza); within the genus Piliocolobus (Western Red Colobus, Piliocolobus badius; Piliocolobus badius badius; Piliocolobus badius temminckii; Piliocolobus badius waldronae; Pennant's Colobus, Piliocolobus pennantii; Piliocolobus pennantii pennantii; Piliocolobus pennantii epieni; Piliocolobus pennantii bouvieri; Preuss's Red Colobus, Piliocolobus preussi; Thollon's Red Colobus, Piliocolobus tholloni; Central African Red Colobus, Piliocolobus foai; Piliocolobus foai foai; Piliocolobus foai ellioti; Piliocolobus foai oustaleti; Piliocolobus foai semlikiensis; Piliocolobus foai parmentierorum; Ugandan Red Colobus, Piliocolobus tephrosceles; Uzyngwa Red Colobus, Piliocolobus gordonorum; Zanzibar Red Colobus, Piliocolobus kirkii; Tana River Red Colobus, Piliocolobus rufomitratus); or within the genus Procolobus (Olive Colobus, Procolobus verus). Within the subfamily Colobinae, an advantageous non-chimpanzee primate may alternatively be from the Langur (leaf monkey) group, within the genus Semnopithecus (Nepal Gray Langur, Semnopithecus schistaceus; Kashmir Gray Langur, Semnopithecus ajax; Tarai Gray Langur, Semnopithecus hector; Northern Plains Gray Langur, Semnopithecus entellus; Black-footed Gray Langur, Semnopithecus hypoleucos; Southern Plains Gray Langur, Semnopithecus dussumieri; Tufted Gray Langur, Semnopithecus priam); within the T. vetulus group or the genus Trachypithecus (Purple-faced Langur, Trachypithecus vetulus; Nilgiri Langur, Trachypithecus johnii); within the T. cristatus group of the genus Trachypithecus (Javan Lutung, Trachypithecus auratus; Silvery Leaf Monkey or Silvery Lutung, Trachypithecus cristatus; Indochinese Lutung, Trachypithecus germaini; Tenasserim Lutung, Trachypithecus barbei); within the T. obscurus group of the genus Trachypithecus (Dusky Leaf Monkey or Spectacled Leaf Monkey, Trachypithecus obscurus; Phayre's Leaf Monkey, Trachypithecus phayrei); within the T. pileatus group of the genus Trachypithecus (Capped Langur, Trachypithecus pileatus; Shortridge's Langur, Trachypithecus shortridgei; Gee's Golden Langur, Trachypithecus geei); within the T. francoisi group of the genus Trachypithecus (Francois' Langur, Trachypithecus francoisi; Hatinh Langur, Trachypithecus hatinhensis; White-headed Langur, Trachypithecus poliocephalus; Laotian Langur, Trachypithecus laotum; Delacour's Langur, Trachypithecus delacouri; Indochinese Black Langur, Trachypithecus ebenus); or within the genus Presbytis (Sumatran Surili, Presbytis melalophos; Banded Surili, Presbytis femoralis; Sarawak Surili, Presbytis chrysomelas; White-thighed Surili, Presbytis siamensis; White-fronted Surili, Presbytis frontata; Javan Surili, Presbytis comata; Thomas's Langur, Presbytis thomasi; Hose's Langur, Presbytis hosei; Maroon Leaf Monkey, Presbytis rubicunda; Mentawai Langur or Joja, Presbytis potenziani; Natuna Island Surili, Presbytis natunae).

[0076] Within the subfamily Colobinae, an advantageous non-chimpanzee primate may alternatively be from the Odd-Nosed group, within the genus Pygathrix (Red-shanked Douc, Pygathrix nemaeus; Black-shanked Douc, Pygathrix nigripes; Gray-shanked Douc, Pygathrix cinerea); within the genus Rhinopithecus (Golden Snub-nosed Monkey, Rhinopithecus roxellana; Black Snub-nosed Monkey, Rhinopithecus bieti; Gray Snub-nosed Monkey, Rhinopithecus brelichi; Tonkin Snub-nosed Langur, Rhinopithecus avunculus); within the genus Nasalis (Proboscis Monkey, Nasalis larvatus); or within the genus Simias (Pig-tailed Langur, Simias concolor).

[0077] As used herein, the term “marmoset” denotes any New-World Monkeys of the genus Callithrix, for example belonging to the Atlantic marmosets of subgenus Callithrix (sic!) (Common Marmoset, Callithrix (Callithrix) jacchus; Black-tufted Marmoset, Callithrix (Callithrix) penicillata; Wied's Marmoset, Callithrix (Callithrix) kuhlii; White-headed Marmoset, Callithrix (Callithrix) geoffroyi; Buffy-headed Marmoset, Callithrix (Callithrix) flaviceps; Buffy-tufted Marmoset, Callithrix (Callithrix) aurita); belonging to the Amazonian marmosets of subgenus Mico (Rio Acari Marmoset, Callithrix (Mico) acariensis; Manicore Marmoset, Callithrix (Mico) manicorensis; Silvery Marmoset, Callithrix (Mico) argentata; White Marmoset, Callithrix (Mico) leucippe; Emilia's Marmoset, Callithrix (Mico) emiliae; Black-headed Marmoset, Callithrix (Mico) nigriceps; Marca's Marmoset, Callithrix (Mico)marcai; Black-tailed Marmoset, Callithrix (Mico) melanura; Santarem Marmoset, Callithrix (Mico) humeralifera; Maues Marmoset, Callithrix (Mico) mauesi; Gold-and-white Marmoset, Callithrix (Mico) chrysoleuca; Hershkovitz's Marmoset, Callithrix (Mico) intermedia; Satéré Marmoset, Callithrix (Mico) saterei); Roosmalens' Dwarf Marmoset belonging to the subgenus Callibella (Callithrix (Callibella) humilis); or the Pygmy Marmoset belonging to the subgenus Cebuella (Callithrix (Cebuella) pygmaea).

[0078] Other genera of the New-World Monkeys comprise tamarins of the genus Saguinus (comprising the S. oedipus-group, the S. midas group, the S. nigricollis group, the S. mystax group, the S. bicolor group and the S. inustus group) and squirrel monkeys of the genus Samiri (e.g. Saimiri sciureus, Saimiri oerstedii, Saimiri ustus, Saimiri boliviensis, Saimiri vanzolini)

[0079] In a preferred embodiment of the bispecific single chain antibody molecule of the invention, the non-chimpanzee primate is an old world monkey. In a more preferred embodiment of the polypeptide, the old world monkey is a monkey of the Papio genus Macaque genus. Most preferably, the monkey of the Macaque genus is Assamese macaque (Macaca assamensis), Barbary macaque (Macaca sylvanus), Bonnet macaque (Macaca radiata), Booted or Sulawesi-Booted macaque (Macaca ochreata), Sulawesi-crested macaque (Macaca nigra), Formosan rock macaque (Macaca cyclopsis), Japanese snow macaque or Japanese macaque (Macaca fuscata), Cynomologus monkey or crab-eating macaque or long-tailed macaque or Java macaque (Macaca fascicularis), Lion-tailed macaque (Macaca silenus), Pigtailed macaque (Macaca nemestrina), Rhesus macaque (Macaca mulatta), Tibetan macaque (Macaca thibetana), Tonkean macaque (Macaca tonkeana), Toque macaque (Macaca sinica), Stump-tailed macaque or Red-faced macaque or Bear monkey (Macaca arctoides), or Moor macaque (Macaca maurus). Most preferably, the monkey of the Papio genus is Hamadryas Baboon, Papio hamadryas; Guinea Baboon, Papio papio; Olive Baboon, Papio anubis; Yellow Baboon, Papio cynocephalus; Chacma Baboon, Papio ursinus.

[0080] In an alternatively preferred embodiment of the bispecific single chain antibody molecule of the invention, the non-chimpanzee primate is a new world monkey. In a more preferred embodiment of the polypeptide, the new world monkey is a monkey of the Callithrix genus (marmoset), the Saguinus genus or the Samiri genus. Most preferably, the monkey of the Callithrix genus is Callithrix jacchus, the monkey of the Saguinus genus is Saguinus oedipus and the monkey of the Samiri genus is Saimiri sciureus.

[0081] The term “cell surface antigen” as used herein denotes a molecule, which is displayed on the surface of a cell. In most cases, this molecule will be located in or on the plasma membrane of the cell such that at least part of this molecule remains accessible from outside the cell in tertiary form. A non-limiting example of a cell surface molecule, which is located in the plasma membrane is a transmembrane protein comprising, in its tertiary conformation, regions of hydrophilicity and hydrophobicity. Here, at least one hydrophobic region allows the cell surface molecule to be embedded, or inserted in the hydrophobic plasma membrane of the cell while the hydrophilic regions extend on either side of the plasma membrane into the cytoplasm and extracellular space, respectively. Non-limiting examples of cell surface molecules which are located on the plasma membrane are proteins which have been modified at a cysteine residue to bear a palmitoyl group, proteins modified at a C-terminal cysteine residue to bear a farnesyl group or proteins which have been modified at the C-terminus to bear a glycosyl phosphatidyl inositol (“GPI”) anchor. These groups allow covalent attachment of proteins to the outer surface of the plasma membrane, where they remain accessible for recognition by extracellular molecules such as antibodies. An example of cell surface antigens is CD3 epsilon.

[0082] In light of this, tumor target antigens can also be characterized as a tumor antigesn. The term “tumor target antigen” as used herein may be understood as those antigens that are presented on tumor cells. These antigens can be presented on the cell surface with an extracellular part, which is often combined with a transmembrane and cytoplasmic part of the molecule. These antigens can sometimes be presented only by tumor cells and never by the normal ones. Tumor antigens can be exclusively expressed on tumor cells or might represent a tumor specific mutation compared to normal cells. In this case, they are called tumor-specific antigens. More common are antigens that are presented by tumor cells and normal cells, and they are called tumor-associated antigens. These tumor-associated antigens can be overexpressed compared to normal cells or are accessible for antibody binding in tumor cells due to the less compact structure of the tumor tissue compared to normal tissue. Preferably, the tumor target antigen bound by the second binding domain of the bispecific antibody of the invention is EGFR, CD44v6 or CD30.

[0083] As described herein above the bispecific single chain antibody molecule of the invention binds with the first binding domain to an epitope of human and non-chimpanzee primate CD3ε (epsilon) chain, wherein the epitope is part of an amino acid sequence comprised in the group consisting of 27 amino acid residues as depicted in SEQ ID NOs. 2, 4, 6, or 8 or a functional fragment thereof.

[0084] In line with the present invention it is preferred for the bispecific single chain antibody molecule of the invention that said epitope is part of an amino acid sequence comprising 26, 25, 24, 23, 22, 21, 20, 19, 18, 17, 16, 15, 14, 13, 12, 11, 10, 9, 8, 7, 6 or 5 amino acids.

[0085] More preferably, wherein said epitope comprises at least the amino acid sequence Gln-Asp-Gly-Asn-Glu (Q-D-G-N-E).

[0086] Within the present invention, a functional fragment of the N-terminal 1-27 amino acid residues means that said functional fragment is still a context-independent epitope maintaining its three-dimensional structural integrity when taken out of its native environment in the CD3 complex (and fused to a heterologous amino acid sequence such as EpCAM or an immunoglobulin Fc part, e.g. as shown in Example 3.1). The maintenance of the three-dimensional structure within the 27 amino acid N-terminal polypeptide or functional fragment thereof of CD3 epsilon can be used for the generation of binding domains which bind to the N-terminal CD3 epsilon polypeptide fragment in vitro and to the native (CD3 epsilon subunit of the) CD3 complex on T cells in vivo with the same binding affinity. Within the present invention, a functional fragment of the N-terminal 1-27 amino acid residues means that CD3 binding domains provided herein can still bind to such functional fragments in a context-independent manner. The person skilled in the art is aware of methods for epitope mapping to determine which amino acid residues of an epitope are recognized by such anti-CD3 binding domains (e.g. alanine scanning; see appended examples).

[0087] Within the present invention it is further preferred that the second binding domain binds to the human tumor target antigen and/or a non-chimpanzee primate tumor target antigen. Particularly preferred, the second binding domain binds to the human tumor target antigen and a non-chimpanzee primate tumor target antigen, preferably a macaque tumor target antigen. It is to be understood, that the second binding domain binds to at least one non-chimpanzee primate tumor target antigen, however, it may also bind to two, three or more, non-chimpanzee primate tumor target antigen homologs. For example, the second binding domain may bind to a Cynomogus monkey tumor target antigen and to a Rhesus monkey tumor target antigen. Preferably, the tumor target antigen is EGFR, CD44v6 or CD30.

[0088] For the generation of the second binding domain of the bispecific single chain antibody molecule of the invention, e.g. bispecific single chain antibodies as defined herein, monoclonal antibodies binding to both of the respective human and/or non-chimpanzee primate cell surface tumor target antigen can be utilized. Appropriate binding domains for the bispecific polypeptide as defined herein e.g. can be derived from cross-species specific monoclonal antibodies by recombinant methods described in the art. A monoclonal antibody binding to a human cell surface antigen and to the homolog of said cell surface antigen in a non-chimpanzee primate can be tested by FACS assays as set forth above. It is evident to those skilled in the art that cross-species specific antibodies can also be generated by hybridoma techniques described in the literature (Milstein and Köhler, Nature 256 (1975), 495-7). For example, mice may be alternately immunized with human and non-chimpanzee primate cell surface antigen. From these mice, cross-species specific antibody-producing hybridoma cells are isolated via hybridoma technology and analysed by FACS as set forth above. The generation and analysis of bispecific polypeptides such as bispecific single chain antibodies exhibiting cross-species specificity as described herein is shown in the following examples. The advantages of the bispecific single chain antibodies exhibiting cross-species specificity include the points enumerated herein.

[0089] In the event that a tylopoda-derived antibody variable domain is used in the first and/or second portion of a bispecific antibody according to this embodiment of the invention, said first and/or second portion may advantageously be derived independently from camel, llama or/and dromedary. This use of such “camelid” antibodies allows the researcher seeking to develop or optimize bispecific antibodies according to this embodiment of the invention to capitalize on the unique types of antibodies known to be produced by these species. These species are namely known to produce high affinity antibodies of only a single variable domain. In the event that a tylopoda antibody is used as the source for the antibody variable domain in the first and/or second portion of the bispecific antibody, it is advantageous to use the VHH domain or a modified variant thereof.

[0090] The term “VHH” denotes a variable region of a heavy chain of a so-called “camelid” antibody. Camelid antibodies comprise a heavy chain, but lack a light chain. As such, a VHH region from such a camelid antibody represents the minimal structural element required to specifically bind to an antigen of interest in these species. Camelid VHH domains have been found to bind to antigen with high affinity (Desmyter et al. 2001. J Biol Chem 276, 26285-90) and possess high stability in solution (Ewert et al. 2002. Biochemistry 41, 3628-36).

[0091] In one embodiment of the invention, the bispecific single chain antibody molecule of the invention comprises a (first) binding domain consisting of one antibody variable domain capable of binding to an epitope of human and non-chimpanzee primate CD3 epsilon chain and a second binding domain consisting of an antibody variable domain capable of binding to a human and an non-chimpanzee tumor target antigen. Preferably, the tumor target antigen is EGFR, CD44v6 or CD30. The first binding domain is preferably a VH domain or a VHH domain. The second binding domain may comprise one antibody variable domain (preferably a VH or VHH domain) or two antibody variable domains (preferably a scFv, i.e. VH-VL or VL-VH). In a preferred embodiment, at least one of said first or second binding domain is CDR-grafted, humanized or human. In another preferred embodiment, at least one of said first or second binding domain is a VHH domain. Preferably, the antibody variable domain of the first binding domain of the bispecific antibody of the invention comprises CDR 1 of SEQ ID NO: 398, CDR 2 of SEQ ID NO. 399 and CDR 3 of SEQ ID NO. 400. Even more preferred, the first binding domain of the bispecific single chain antibody molecule comprises an antibody variable domain as shown in SEQ ID NO. 397 or an amino acid sequence at least 80%, more preferred at least 90% or 95% identical, most preferred at least 96% identical to the amino acid sequence of SEQ ID NO. 397.

[0092] In another embodiment of the invention, the bispecific single chain antibody molecule comprises a first binding domain capable of binding to an epitope of the human and non-chimpanzee primate CD3 epsilon chain, wherein the epitope is part of an amino acid sequence comprised in the group consisting of SEQ ID NOs. 2, 4, 6, and 8, and a second binding domain consisting of one antibody variable domain capable of binding to an epitope of a human and a non-chimpanzee primate tumor target antigen. Preferably, the tumor target antigen is EGFR, CD44v6 or CD30.

[0093] In this embodiment, the first binding domain comprises one (preferably a VH domain or a VHH domain) or two variable domains (preferably a scFv, i.e. VH-VL or VL-VH). In a preferred embodiment, at least one of said first or second binding domain is CDR-grafted, humanized or human. If the first binding domain of the bispecific single chain antibody molecule of the invention comprises two variable domains (VH-VL or VL-VH) it is preferred that the first binding domain capable of binding to an epitope of human and non-chimpanzee primate CD3ε chain comprises a VL region comprising CDR-L1, CDR-L2 and CDR-L3 selected from:
[0094] (a) CDR-L1 as depicted in SEQ ID NO. 27, CDR-L2 as depicted in SEQ ID NO. 28 and CDR-L3 as depicted in SEQ ID NO. 29;
[0095] (b) CDR-L1 as depicted in SEQ ID NO. 117, CDR-L2 as depicted in SEQ ID NO. 118 and CDR-L3 as depicted in SEQ ID NO. 119; and
[0096] (c) CDR-L1 as depicted in SEQ ID NO. 153, CDR-L2 as depicted in SEQ ID NO. 154 and CDR-L3 as depicted in SEQ ID NO. 155.

[0097] The variable regions, i.e. the variable light chain (“L” or “VL”) and the variable heavy chain (“H” or “VH”) are understood in the art to provide the binding domain of an antibody. This variable regions harbor the complementary determining regions. The term “complementary determining region” (CDR) is well known in the art to dictate the antigen specificity of an antibody. The term “CDR-L” or “L CDR” or “LCDR” refers to CDRs in the VL, whereas the term “CDR-H” or “H CDR” or “HCDR” refers to the CDRs in the VH.

[0098] In an alternatively preferred embodiment of the bispecific single chain antibody molecule of the invention the first binding domain capable of binding to an epitope of human and non-chimpanzee primate CD3ε chain comprises a VH region comprising CDR-H 1, CDR-H2 and CDR-H3 selected from:
[0099] (a) CDR-H1 as depicted in SEQ ID NO. 12, CDR-H2 as depicted in SEQ ID NO. 13 and CDR-H3 as depicted in SEQ ID NO. 14;
[0100] (b) CDR-H1 as depicted in SEQ ID NO. 30, CDR-H2 as depicted in SEQ ID NO. 31 and CDR-H3 as depicted in SEQ ID NO. 32;
[0101] (c) CDR-H1 as depicted in SEQ ID NO. 48, CDR-H2 as depicted in SEQ ID NO. 49 and CDR-H3 as depicted in SEQ ID NO. 50;
[0102] (d) CDR-H1 as depicted in SEQ ID NO. 66, CDR-H2 as depicted in SEQ ID NO. 67 and CDR-H3 as depicted in SEQ ID NO. 68;
[0103] (e) CDR-H1 as depicted in SEQ ID NO. 84, CDR-H2 as depicted in SEQ ID NO. 85 and CDR-H3 as depicted in SEQ ID NO. 86;
[0104] (f) CDR-H1 as depicted in SEQ ID NO. 102, CDR-H2 as depicted in SEQ ID NO. 103 and CDR-H3 as depicted in SEQ ID NO. 104;
[0105] (g) CDR-H1 as depicted in SEQ ID NO. 120, CDR-H2 as depicted in SEQ ID NO. 121 and CDR-H3 as depicted in SEQ ID NO. 122;
[0106] (h) CDR-H1 as depicted in SEQ ID NO. 138, CDR-H2 as depicted in SEQ ID NO. 139 and CDR-H3 as depicted in SEQ ID NO. 140;
[0107] (i) CDR-H1 as depicted in SEQ ID NO. 156, CDR-H2 as depicted in SEQ ID NO. 157 and CDR-H3 as depicted in SEQ ID NO. 158; and
[0108] (j) CDR-H1 as depicted in SEQ ID NO. 174, CDR-H2 as depicted in SEQ ID NO. 175 and CDR-H3 as depicted in SEQ ID NO. 176.

[0109] It is further preferred that the binding domain capable of binding to an epitope of human and non-chimpanzee primate CD3ε chain comprises a VL region selected from the group consisting of a VL region as depicted in SEQ ID NO. 35, 39, 125, 129, 161 or 165.

[0110] It is alternatively preferred that the first binding domain capable of binding to an epitope of human and non-chimpanzee primate CD3ε chain comprises a VH region selected from the group consisting of a VH region as depicted in SEQ ID NO. 15, 19, 33, 37, 51, 55, 69, 73, 87, 91, 105, 109, 123, 127, 141, 145, 159, 163, 177 or 181.

[0111] More preferably, the bispecific single chain antibody molecule of the invention is characterized by the first binding domain capable of binding to an epitope of human and non-chimpanzee primate CD3ε chain, which comprises a VL region and a VH region selected from the group consisting of:
[0112] (a) a VL region as depicted in SEQ ID NO. 17 or 21 and a VH region as depicted in SEQ ID NO. 15 or 19;
[0113] (b) a VL region as depicted in SEQ ID NO. 35 or 39 and a VH region as depicted in SEQ ID NO. 33 or 37;
[0114] (c) a VL region as depicted in SEQ ID NO. 53 or 57 and a VH region as depicted in SEQ ID NO. 51 or 55;
[0115] (d) a VL region as depicted in SEQ ID NO. 71 or 75 and a VH region as depicted in SEQ ID NO. 69 or 73;
[0116] (e) a VL region as depicted in SEQ ID NO. 89 or 93 and a VH region as depicted in SEQ ID NO. 87 or 91;
[0117] (f) a VL region as depicted in SEQ ID NO. 107 or 111 and a VH region as depicted in SEQ ID NO. 105 or 109;
[0118] (g) a VL region as depicted in SEQ ID NO. 125 or 129 and a VH region as depicted in SEQ ID NO. 123 or 127;
[0119] (h) a VL region as depicted in SEQ ID NO. 143 or 147 and a VH region as depicted in SEQ ID NO. 141 or 145;
[0120] (i) a VL region as depicted in SEQ ID NO. 161 or 165 and a VH region as depicted in SEQ ID NO. 159 or 163; and
[0121] (j) a VL region as depicted in SEQ ID NO. 179 or 183 and a VH region as depicted in SEQ ID NO. 177 or 181.

[0122] According to a preferred embodiment of the bispecific single chain antibody molecule of the invention the pairs of VH-regions and VL-regions in the first binding domain binding to CD3 epsilon are in the format of a single chain antibody (scFv). The VH and VL regions are arranged in the order VH-VL or VL-VH. It is preferred that the VH-region is positioned N-terminally to a linker sequence. The VL-region is positioned C-terminally of the linker sequence. Put in other words, the domain arrangement in the CD3 binding domain of the bispecific single chain antibody molecule of the invention is preferably VH-VL, with said CD3 binding domain located C-terminally to the second (cell surface antigen) binding domain. Preferably the VH-VL comprises or is SEQ ID NO. 185.

[0123] A preferred embodiment of the above described bispecific single chain antibody molecule of the invention is characterized by the first binding domain capable of binding to an epitope of human and non-chimpanzee primate CD3ε chain comprising an amino acid sequence selected from the group consisting of SEQ ID NOs: 23, 25, 41, 43, 59, 61, 77, 79, 95, 97, 113, 115, 131, 133, 149, 151, 167, 169, 185 or 187.

[0124] According to a preferred embodiment of the invention an above characterized bispecific single chain antibody molecule comprises a group of the following sequences as CDR1-3 in the second binding domain selected from the group consisting of:
[0125] (a) CDR 1 of SEQ ID NO: 376, CDR 2 of SEQ ID NO. 377 and CDR 3 of SEQ ID NO. 378; and
[0126] (b) CDR 1 of SEQ ID NO: 387, CDR 2 of SEQ ID NO. 388 and CDR 3 of SEQ ID NO. 389.

[0127] The sequences of the corresponding VL- and VH-regions of the second binding domain of the bispecific single chain antibody molecule of the invention as well as of the respective scFvs are shown in the sequence listing.

[0128] In the bispecific single chain antibody molecule of the invention the binding domains are arranged as exemplified in the appended examples.

[0129] A even more preferred embodiment of the invention concerns an above characterized bispecific single chain antibody, wherein the second binding domain comprises an antibody variable domain as shown in SEQ ID NO. 375 or 386 or an amino acid sequence at least 80%, more preferred at least 90% or 95% identical, most preferred at least 96% identical to the amino acid sequence of SEQ ID NO. 375 or 386.

[0130] A particularly preferred embodiment of the invention concerns a bispecific single chain antibody molecule, wherein the bispecific single chain antibody molecule comprises a sequence selected from:
[0131] (a) an amino acid sequence as depicted in any of SEQ ID NOs. 380, 382, 384, 391, 393 or 395;
[0132] (b) an amino acid sequence encoded by a nucleic acid sequence as depicted in any of SEQ ID NOs: 381, 383, 385, 392, 394 or 396; and
[0133] (c) an amino acid sequence at least 90% identical, more preferred at least 95% identical, most preferred at least 96% identical to the amino acid sequence of (a) or (b).

[0134] The invention relates to a bispecific single chain antibody molecule comprising an amino acid sequence as depicted in any of SEQ ID NOs: 380, 382, 384, 391, 393 or 395, as well as to an amino acid sequences at least 85% identical, preferably 90%, more preferred at least 95% identical, most preferred at least 96, 97, 98, or 99 identical to the amino acid sequence of SEQ ID NOs: 380, 382, 384, 391, 393 or 395. The invention relates also to the corresponding nucleic acid sequences as depicted in any of SEQ ID NOs: 381, 383, 385, 392, 394, or 396 as well as to nucleic acid sequences at least 85% identical, preferably 90%, more preferred at least 95 identical, most preferred at least 96, 97, 98, or 99% identical to the nucleic acid sequences shown in SEQ ID NOs: 381, 383, 385, 392, 394, or 396. It is to be understood that the sequence identity is determined over the entire nucleotide or amino acid sequence. For sequence alignments, for example, the programs Gap or BestFit can be used (Needleman and Wunsch J. Mol. Biol. 48 (1970), 443-453; Smith and Waterman, Adv. Appl. Math 2 (1981), 482-489), which is contained in the GCG software package (Genetics Computer Group, 575 Science Drive, Madison, Wis., USA 53711 (1991). It is a routine method for those skilled in the art to determine and identify a nucleotide or amino acid sequence having e.g. 85% (90%, 95%, 96%, 97%, 98% or 99%) sequence identity to the nucleotide or amino acid sequences of the bispecific single single chain antibody of the invention. For example, according to Crick's Wobble hypothesis, the 5′ base on the anti-codon is not as spatially confined as the other two bases, and could thus have non-standard base pairing. Put in other words: the third position in a codon triplet may vary so that two triplets which differ in this third position may encode the same amino acid residue. Said hypothesis is well known to the person skilled in the art (see e.g. http://en.wikipedia.org/wiki/Wobble_Hypothesis; Crick, J Mol Biol 19 (1966): 548-55).

[0135] Preferred domain arrangements in the single domain bispecific single chain antibody constructs of the invention are shown in the following examples.

[0136] In a preferred embodiment of the invention, the bispecific single chain antibodies are cross-species specific for CD3 epsilon and for human and non-chimpanzee primate tumor target antigens recognized by their second binding domain.

[0137] In an alternative embodiment the present invention provides a nucleic acid sequence encoding an above described bispecific single chain antibody molecule of the invention.

[0138] The present invention also relates to a vector comprising the nucleic acid molecule of the present invention.

[0139] Many suitable vectors are known to those skilled in molecular biology, the choice of which would depend on the function desired and include plasmids, cosmids, viruses, bacteriophages and other vectors used conventionally in genetic engineering. Methods which are well known to those skilled in the art can be used to construct various plasmids and vectors; see, for example, the techniques described in Sambrook et al. (loc cit.) and Ausubel, Current Protocols in Molecular Biology, Green Publishing Associates and Wiley Interscience, N.Y. (1989), (1994). Alternatively, the polynucleotides and vectors of the invention can be reconstituted into liposomes for delivery to target cells. As discussed in further details below, a cloning vector was used to isolate individual sequences of DNA. Relevant sequences can be transferred into expression vectors where expression of a particular polypeptide is required. Typical cloning vectors include pBluescript SK, pGEM, pUC9, pBR322 and pGBT9. Typical expression vectors include pTRE, pCAL-n-EK, pESP-1, pOP13CAT.

[0140] Preferably said vector comprises a nucleic acid sequence which is a regulatory sequence operably linked to said nucleic acid sequence defined herein.

[0141] The term “regulatory sequence” refers to DNA sequences, which are necessary to effect the expression of coding sequences to which they are ligated. The nature of such control sequences differs depending upon the host organism. In prokaryotes, control sequences generally include promoter, ribosomal binding site, and terminators. In eukaryotes generally control sequences include promoters, terminators and, in some instances, enhancers, transactivators or transcription factors. The term “control sequence” is intended to include, at a minimum, all components the presence of which are necessary for expression, and may also include additional advantageous components.

[0142] The term “operably linked” refers to a juxtaposition wherein the components so described are in a relationship permitting them to function in their intended manner. A control sequence “operably linked” to a coding sequence is ligated in such a way that expression of the coding sequence is achieved under conditions compatible with the control sequences. In case the control sequence is a promoter, it is obvious for a skilled person that double-stranded nucleic acid is preferably used.

[0143] Thus, the recited vector is preferably an expression vector. An “expression vector” is a construct that can be used to transform a selected host and provides for expression of a coding sequence in the selected host. Expression vectors can for instance be cloning vectors, binary vectors or integrating vectors. Expression comprises transcription of the nucleic acid molecule preferably into a translatable mRNA. Regulatory elements ensuring expression in prokaryotes and/or eukaryotic cells are well known to those skilled in the art. In the case of eukaryotic cells they comprise normally promoters ensuring initiation of transcription and optionally poly-A signals ensuring termination of transcription and stabilization of the transcript. Possible regulatory elements permitting expression in prokaryotic host cells comprise, e.g., the P_{L}, lac, trp or tac promoter in E. coli, and examples of regulatory elements permitting expression in eukaryotic host cells are the AOX1 or GAL1 promoter in yeast or the CMV-, SV40-, RSV-promoter (Rous sarcoma virus), CMV-enhancer, SV40-enhancer or a globin intron in mammalian and other animal cells.

[0144] Beside elements, which are responsible for the initiation of transcription such regulatory elements may also comprise transcription termination signals, such as the SV40-poly-A site or the tk-poly-A site, downstream of the polynucleotide. Furthermore, depending on the expression system used leader sequences capable of directing the polypeptide to a cellular compartment or secreting it into the medium may be added to the coding sequence of the recited nucleic acid sequence and are well known in the art; see also the appended Examples. The leader sequence(s) is (are) assembled in appropriate phase with translation, initiation and termination sequences, and preferably, a leader sequence capable of directing secretion of translated protein, or a portion thereof, into the periplasmic space or extracellular medium. Optionally, the heterologous sequence can encode a fusion protein including an N-terminal identification peptide imparting desired characteristics, e.g., stabilization or simplified purification of expressed recombinant product; see supra. In this context, suitable expression vectors are known in the art such as Okayama-Berg cDNA expression vector pcDV1 (Pharmacia), pCDM8, pRc/CMV, pcDNA1, pcDNA3 (In-vitrogene), pEF-DHFR, pEF-ADA or pEF-neo (Mack et al. PNAS (1995) 92, 7021-7025 and Raum et al. Cancer Immunol Immunother (2001) 50(3), 141-150) or pSPORT1 (GIBCO BRL).

[0145] Preferably, the expression control sequences will be eukaryotic promoter systems in vectors capable of transforming of transfecting eukaryotic host cells, but control sequences for prokaryotic hosts may also be used. Once the vector has been incorporated into the appropriate host, the host is maintained under conditions suitable for high level expression of the nucleotide sequences, and as desired, the collection and purification of the bispecific single chain antibody molecule of the invention may follow; see, e.g., the appended examples.

[0146] An alternative expression system, which can be used to express a cell cycle interacting protein is an insect system. In one such system, Autographa californica nuclear polyhedrosis virus (AcNPV) is used as a vector to express foreign genes in Spodoptera frugiperda cells or in Trichoplusia larvae. The coding sequence of a recited nucleic acid molecule may be cloned into a nonessential region of the virus, such as the polyhedrin gene, and placed under control of the polyhedrin promoter. Successful insertion of said coding sequence will render the polyhedrin gene inactive and produce recombinant virus lacking coat protein coat. The recombinant viruses are then used to infect S. frugiperda cells or Trichoplusia larvae in which the protein of the invention is expressed (Smith, J. Virol. 46 (1983), 584; Engelhard, Proc. Nat. Acad. Sci. USA 91 (1994), 3224-3227).

[0147] Additional regulatory elements may include transcriptional as well as translational enhancers. Advantageously, the above-described vectors of the invention comprise a selectable and/or scorable marker.

[0148] Selectable marker genes useful for the selection of transformed cells and, e.g., plant tissue and plants are well known to those skilled in the art and comprise, for example, antimetabolite resistance as the basis of selection for dhfr, which confers resistance to methotrexate (Reiss, Plant Physiol. (Life Sci. Adv.) 13 (1994), 143-149); npt, which confers resistance to the aminoglycosides neomycin, kanamycin and paromycin (Herrera-Estrella, EMBO J. 2 (1983), 987-995) and hygro, which confers resistance to hygromycin (Marsh, Gene 32 (1984), 481-485). Additional selectable genes have been described, namely trpB, which allows cells to utilize indole in place of tryptophan; hisD, which allows cells to utilize histinol in place of histidine (Hartman, Proc. Natl. Acad. Sci. USA 85 (1988), 8047); mannose-6-phosphate isomerase which allows cells to utilize mannose (WO 94/20627) and ODC (ornithine decarboxylase) which confers resistance to the ornithine decarboxylase inhibitor, 2-(difluoromethyl)-DL-ornithine, DFMO (McConlogue, 1987, In: Current Communications in Molecular Biology, Cold Spring Harbor Laboratory ed.) or deaminase from Aspergillus terreus which confers resistance to Blasticidin S (Tamura, Biosci. Biotechnol. Biochem. 59 (1995), 2336-2338).

[0149] Useful scorable markers are also known to those skilled in the art and are commercially available. Advantageously, said marker is a gene encoding luciferase (Giacomin, Pl. Sci. 116 (1996), 59-72; Scikantha, J. Bact. 178 (1996), 121), green fluorescent protein (Gerdes, FEBS Lett. 389 (1996), 44-47) or β-glucuronidase (Jefferson, EMBO J. 6 (1987), 3901-3907). This embodiment is particularly useful for simple and rapid screening of cells, tissues and organisms containing a recited vector.

[0150] As described above, the recited nucleic acid molecule can be used alone or as part of a vector to express the bispecific single chain antibody molecule of the invention in cells, for, e.g., purification but also for gene therapy purposes. The nucleic acid molecules or vectors containing the DNA sequence(s) encoding any one of the above described bispecific single chain antibody molecule of the invention is introduced into the cells which in turn produce the polypeptide of interest. Gene therapy, which is based on introducing therapeutic genes into cells by ex-vivo or in-vivo techniques is one of the most important applications of gene transfer. Suitable vectors, methods or gene-delivery systems for in-vitro or in-vivo gene therapy are described in the literature and are known to the person skilled in the art; see, e.g., Giordano, Nature Medicine 2 (1996), 534-539; Schaper, Circ. Res. 79 (1996), 911-919; Anderson, Science 256 (1992), 808-813; Verma, Nature 389 (1994), 239; Isner, Lancet 348 (1996), 370-374; Muhlhauser, Circ. Res. 77 (1995), 1077-1086; Onodera, Blood 91 (1998), 30-36; Verma, Gene Ther. 5 (1998), 692-699; Nabel, Ann. N.Y. Acad. Sci. 811 (1997), 289-292; Verzeletti, Hum. Gene Ther. 9 (1998), 2243-51; Wang, Nature Medicine 2 (1996), 714-716; WO 94/29469; WO 97/00957, U.S. Pat. No. 5,580,859; U.S. Pat. No. 5,589,466; or Schaper, Current Opinion in Biotechnology 7 (1996), 635-640; dos Santos Coura and Nardi Virol J. (2007), 4:99. The recited nucleic acid molecules and vectors may be designed for direct introduction or for introduction via liposomes, or viral vectors (e.g., adenoviral, retroviral) into the cell. Preferably, said cell is a germ line cell, embryonic cell, or egg cell or derived there from, most preferably said cell is a stem cell. An example for an embryonic stem cell can be, inter alia, a stem cell as described in Nagy, Proc. Natl. Acad. Sci. USA 90 (1993), 8424-8428.

[0151] The invention also provides for a host transformed or transfected with a vector of the invention. Said host may be produced by introducing the above described vector of the invention or the above described nucleic acid molecule of the invention into the host. The presence of at least one vector or at least one nucleic acid molecule in the host may mediate the expression of a gene encoding the above described single chain antibody constructs.

[0152] The described nucleic acid molecule or vector of the invention, which is introduced in the host may either integrate into the genome of the host or it may be maintained extrachromosomally.

[0153] The host can be any prokaryote or eukaryotic cell.

[0154] The term “prokaryote” is meant to include all bacteria, which can be transformed or transfected with DNA or RNA molecules for the expression of a protein of the invention. Prokaryotic hosts may include gram negative as well as gram positive bacteria such as, for example, E. coli, S. typhimurium, Serratia marcescens and Bacillus subtilis. The term “eukaryotic” is meant to include yeast, higher plant, insect and preferably mammalian cells. Depending upon the host employed in a recombinant production procedure, the protein encoded by the polynucleotide of the present invention may be glycosylated or may be non-glycosylated. Especially preferred is the use of a plasmid or a virus containing the coding sequence of the bispecific single chain antibody molecule of the invention and genetically fused thereto an N-terminal FLAG-tag and/or C-terminal His-tag. Preferably, the length of said FLAG-tag is about 4 to 8 amino acids, most preferably 8 amino acids. An above described polynucleotide can be used to transform or transfect the host using any of the techniques commonly known to those of ordinary skill in the art. Furthermore, methods for preparing fused, operably linked genes and expressing them in, e.g., mammalian cells and bacteria are well-known in the art (Sambrook, loc cit.).

[0155] Preferably, said the host is a bacterium or an insect, fungal, plant or animal cell.

[0156] It is particularly envisaged that the recited host may be a mammalian cell. Particularly preferred host cells comprise CHO cells, COS cells, myeloma cell lines like SP2/0 or NS/0. As illustrated in the appended examples, particularly preferred are CHO-cells as hosts.

[0157] More preferably said host cell is a human cell or human cell line, e.g. per.c6 (Kroos, Biotechnol. Prog., 2003, 19:163-168).

[0158] In a further embodiment, the present invention thus relates to a process for the production of a bispecific single chain antibody molecule of the invention, said process comprising culturing a host of the invention under conditions allowing the expression of the bispecific single chain antibody molecule of the invention and recovering the produced polypeptide from the culture.

[0159] The transformed hosts can be grown in fermentors and cultured according to techniques known in the art to achieve optimal cell growth. The bispecific single chain antibody molecule of the invention can then be isolated from the growth medium, cellular lysates, or cellular membrane fractions. The isolation and purification of the, e.g., microbially expressed bispecific single chain antibody molecules may be by any conventional means such as, for example, preparative chromatographic separations and immunological separations such as those involving the use of monoclonal or polyclonal antibodies directed, e.g., against a tag of the bispecific single chain antibody molecule of the invention or as described in the appended examples.

[0160] The conditions for the culturing of a host, which allow the expression are known in the art to depend on the host system and the expression system/vector used in such process. The parameters to be modified in order to achieve conditions allowing the expression of a recombinant polypeptide are known in the art. Thus, suitable conditions can be determined by the person skilled in the art in the absence of further inventive input.

[0161] Once expressed, the bispecific single chain antibody molecule of the invention can be purified according to standard procedures of the art, including ammonium sulfate precipitation, affinity columns, column chromatography, gel electrophoresis and the like; see, Scopes, “Protein Purification”, Springer-Verlag, N.Y. (1982). Substantially pure polypeptides of at least about 90 to 95% homogeneity are preferred, and 98 to 99% or more homogeneity are most preferred, for pharmaceutical uses. Once purified, partially or to homogeneity as desired, the bispecific single chain antibody molecule of the invention may then be used therapeutically (including extracorporeally) or in developing and performing assay procedures. Furthermore, examples for methods for the recovery of the bispecific single chain antibody molecule of the invention from a culture are described in detail in the appended examples. The recovery can also be achieved by a method for the isolation of the bispecific single chain antibody molecule of the invention capable of binding to an epitope of human and non-chimpanzee primate CD3 epsilon (CD3 [symbol] , the method comprising the steps of:

(a) contacting the polypeptide(s) with an N-terminal fragment of the extracellular domain of CD3ε of maximal 27 amino acids comprising the amino acid sequence Gln-Asp-Gly-Asn-Glu-Glu-Met-Gly (SEQ ID NO. 341) or Gln-Asp-Gly-Asn-Glu-Glu-Ile-Gly (SEQ ID NO. 342), fixed via its C-terminus to a solid phase;
(b) eluting the bound polypeptide(s) from said fragment; and
(c) isolating the polypeptide(s) from the eluate of (b).

[0162] It is preferred that the polypeptide(s) isolated by the above method of the invention are human.

[0163] This method or the isolation of the bispecific single chain antibody molecule of the invention is understood as a method for the isolation of one or more different polypeptides with the same specificity for the fragment of the extracellular domain of CD3ε comprising at its N-terminus the amino acid sequence Gln-Asp-Gly-Asn-Glu-Glu-Met-Gly (SEQ ID NO. 341) or Gln-Asp-Gly-Asn-Glu-Glu-Ile-Gly (SEQ ID NO. 342) from a plurality of polypeptide candidates as well as a method for the purification of a polypeptide from a solution. A non-limiting example for the latter method for the purification of a bispecific single chain antibody molecule from a solution is e.g. the purification of a recombinantly expressed bispecific single chain antibody molecule from a culture supernatant or a preparation from such culture. As stated above the fragment used in this method is an N-terminal fragment of the extracellular domain of the primate CD3ε molecule. The amino acid sequence of the extracellular domain of the CD3ε molecule of different species is depicted in SEQ ID NOs: 1, 3, 5 and 7. The two forms of the N-terminal octamer are depicted in SEQ ID NOs: 341 and 342. It is preferred that this N-terminus is freely available for binding of the polypeptides to be identified by the method of the invention. The term “freely available” is understood in the context of the invention as free of additional motives such as a His-tag. The interference of such a His-tag with a binding molecule identified by the method of the invention is described in the appended Examples 6 and 20.

[0164] According to this method said fragment is fixed via its C-terminus to a solid phase. The person skilled in the art will easily and without any inventive ado elect a suitable solid phase support dependent from the used embodiment of the method of the invention. Examples for a solid support comprise but are not limited to matrices like beads (e.g. agarose beads, sepharose beads, polystyrol beads, dextran beads), plates (culture plates or MultiWell plates) as well as chips known e.g. from Biacore®. The selection of the means and methods for the fixation/immobilization of the fragment to said solid support depend on the election of the solid support. A commonly used method for the fixation/immobilization is a coupling via an N-hydroxysuccinimide (NHS) ester. The chemistry underlying this coupling as well as alternative methods for the fixation/immobilization are known to the person skilled in the art, e.g. from Hermanson “Bioconjugate Techniques”, Academic Press, Inc. (1996). For the fixation to/immobilization on chromatographic supports the following means are commonly used: NHS-activated sepharose (e.g. HiTrap-NHS of GE Life Science-Amersham), CnBr-activated sepharose (e.g. GE Life Science-Amersham), NHS-activated dextran beads (Sigma) or activated polymethacrylate. These reagents may also be used in a batch approach. Moreover, dextran beads comprising iron oxide (e.g. available from Miltenyi) may be used in a batch approach. These beads may be used in combination with a magnet for the separation of the beads from a solution. Polypeptides can be immobilized on a Biacore chip (e.g. CM5 chips) by the use of NHS activated carboxymethyldextran. Further examples for an appropriate solid support are amine reactive MultiWell plates (e.g. Nunc Immobilizer™ plates). According to this method said fragment of the extracellular domain of CD3 epsilon can be directly coupled to the solid support or via a stretch of amino acids, which might be a linker or another protein/polypeptide moiety. Alternatively, the extracellular domain of CD3 epsilon can be indirectly coupled via one or more adaptor molecule(s).

[0165] Means and methods for the eluation of a peptide or polypeptide bound to an immobilized epitope are well known in the art. The same holds true for methods for the isolation of the identified polypeptide(s) from the eluate.

[0166] A method for the isolation of one or more different bispecific single chain antibody molecule(s) with the same specificity for the fragment of the extracellular domain of CD3ε comprising at its N-terminus the amino acid sequence Gln-Asp-Gly-Asn-Glu-Glu-X-Gly (with X being Met or Ile) from a plurality of polypeptide candidates may comprise one or more steps of the following methods for the selection of antigen-specific entities:

CD3ε specific binding domains can be selected from antibody derived repertoires. A phage display library can be constructed based on standard procedures, as for example disclosed in “Phage Display: A Laboratory Manual”; Ed. Barbas, Burton, Scott & Silverman; Cold Spring Harbor Laboratory Press, 2001. The format of the antibody fragments in the antibody library can be scFv, but may generally also be a Fab fragment or even a single domain antibody fragment. For the isolation of antibody fragments naïve antibody fragment libraries may be used. For the selection of potentially low immunogenic binding entities in later therapeutic use, human antibody fragment libraries may be favourable for the direct selection of human antibody fragments. In some cases they may form the basis for synthetic antibody libraries (Knappik et al. J Mol. Biol. 2000, 296:57 ff). The corresponding format may be Fab, scFv (as described below) or domain antibodies (dAbs, as reviewed in Holt et al., Trends Biotechnol. 2003, 21:484 ff).

[0167] It is also known in the art that in many cases there is no immune human antibody source available against the tumor target antigen. Therefore animals are immunized with the tumor target antigen and the respective antibody libraries isolated from animal tissue as e.g. spleen or PBMCs. The N-terminal fragment may be biotinylated or covalently linked to proteins like KLH or bovine serum albumin (BSA). According to common approaches rodents are used for immunization. Some immune antibody repertoires of non-human origin may be especially favourable for other reasons, e.g. for the presence of single domain antibodies (VHH) derived from cameloid species (as described in Muyldermans, J Biotechnol. 74:277; De Genst et al. Dev Como Immunol. 2006, 30:187 ff). Therefore a corresponding format of the antibody library may be Fab, scFv (as described below) or single domain antibodies (VHH).

[0168] In one possible approach ten weeks old F1 mice from balb/c×C57black crossings can be immunized with whole cells e.g. expressing transmembrane EpCAM N-terminally displaying as translational fusion the N-terminal amino acids 1 to 27 of the mature CD3ε chain. Alternatively, mice can be immunized with 1-27 CD3 epsilon-Fc fusion protein (a corresponding approach is described in the appended Example 2). After booster immunization(s), blood samples can be taken and antibody serum titer against the CD3-positive T cells can be tested e.g. in FACS analysis. Usually, serum titers are significantly higher in immunized than in non-immunized animals.

[0169] Immunized animals may form the basis for the construction of immune antibody libraries. Examples of such libraries comprise phage display libraries. Such libraries may be generally constructed based on standard procedures, as for example disclosed in “Phage Display: A Laboratory Manual”; Ed. Barbas, Burton, Scott & Silverman; Cold Spring Harbor Laboratory Press, 2001.

[0170] The non-human antibodies can also be humanized via phage display due to the generation of more variable antibody libraries that can be subsequently enriched for binders during selection.

[0171] In a phage display approach any one of the pools of phages that displays the antibody libraries forms a basis to select binding entities using the respective antigen as target molecule. The central step in which antigen specific, antigen bound phages are isolated is designated as panning. Due to the display of the antibody fragments on the surface of the phages, this general method is called phage display. One preferred method of selection is the use of small proteins such as the filamentous phage N2 domain translationally fused to the N-terminus of the scFv displayed by the phage. Another display method known in the art, which may be used to isolate binding entities is the ribosome display method (reviewed in Groves & Osbourn, Expert Opin Biol Ther. 2005, 5:125 ff; Lipovsek & Pluckthun, J Immunol Methods 2004, 290:52 ff). In order to demonstrate binding of scFv phage particles to a 1-27 CD3ε-Fc fusion protein a phage library carrying the cloned scFv-repertoire can be harvested from the respective culture supernatant by PEG (polyethyleneglycole). ScFv phage particles may be incubated with immobilized CD3ε Fc fusion protein. The immobilized CD3ε Fc fusion protein may be coated to a solid phase. Binding entities can be eluted and the eluate can be used for infection of fresh uninfected bacterial hosts. Bacterial hosts successfully transduced with a phagemid copy, encoding a human scFv-fragment, can be selected again for carbenicillin resistance and subsequently infected with e.g. VCMS 13 helper phage to start the second round of antibody display and in vitro selection. A total of 4 to 5 rounds of selections is carried out, normally. The binding of isolated binding entities can be tested on CD3 epsilon positive Jurkat cells, HPBall cells, PBMCs or transfected eukaryotic cells that carry the N-terminal CD3ε sequence fused to surface displayed EpCAM using a flow cytometric assay (see appended Example 4).

[0172] Preferably, the above method may be a method, wherein the fragment of the extracellular domain of CD3ε consists of one or more fragments of a polypeptide having an amino acid sequence of any one depicted in SEQ ID NOs. 2, 4, 6 or 8. More preferably, said fragment is 8, 9, 10, 11, 12, 13, 14, 15, 16, 17, 18, 19, 20, 21, 22, 23, 24, 25, 26, or 27 amino acid residues in length.

[0173] This method of identification of a bispecific single chain antibody molecule may be a method of screening a plurality of bispecific single chain antibody molecules comprising a cross-species specific binding domain binding to an epitope of human and non-chimpanzee primate CD3ε. Alternatively, the method of identification is a method of purification/isolation of a bispecific single chain antibody molecule comprising a cross-species specific binding domain binding to an epitope of human and non-chimpanzee primate CD3ε.

[0174] Furthermore, the invention provides for a composition comprising a bispecific single chain antibody molecule of the invention or a bispecific single chain antibody as produced by the process disclosed above. Preferably, said composition is a pharmaceutical composition.

[0175] The invention provides also for a bispecific single chain antibody molecule as defined herein, or produced according to the process as defined herein, wherein said bispecific single chain antibody molecule is for use in the prevention, treatment or amelioration of cancer. Preferably, CD44v6×CD3 bispecific single chain antibodies of the invention can be used as therapeutic agents in order to treat squamous cell carcinoma. In particular, said CD44v6×CD3 bispecific single chain antibodies are useful to kill the migratory subset of colorectal carcinoma cells. Preferably, EGFR×CD3 bispecific single chain antibodies can be used as therapeutic agents in order to treat epithelial cancer. Preferably, CD30×CD3 bispecific single chain antibodies can be used as therapeutic agents in order to treat Hodgkin's lymphoma. It is preferred that the bispecific single chain is further comprising suitable formulations of carriers, stabilizers and/or excipients. Moreover, it is preferred that said bispecific single chain antibody molecule is suitable to be administered in combination with an additional drug. Said drug may be a non-proteinaceous compound or a proteinaceous compound and may be administered simultaneously or non-simultaneously with the bispecific single chain antibody molecule as defined herein.

[0176] In accordance with the invention, the term “pharmaceutical composition” relates to a composition for administration to a patient, preferably a human patient. The particular preferred pharmaceutical composition of this invention comprises bispecific single chain antibodies directed against and generated against context-independent CD3 epitopes. Preferably, the pharmaceutical composition comprises suitable formulations of carriers, stabilizers and/or excipients. In a preferred embodiment, the pharmaceutical composition comprises a composition for parenteral, transdermal, intraluminal, intraarterial, intrathecal and/or intranasal administration or by direct injection into tissue. It is in particular envisaged that said composition is administered to a patient via infusion or injection. Administration of the suitable compositions may be effected by different ways, e.g., by intravenous, intraperitoneal, subcutaneous, intramuscular, topical or intradermal administration. In particular, the present invention provides for an uninterrupted administration of the suitable composition. As a non-limiting example, uninterrupted, i.e. continuous administration may be realized by a small pump system worn by the patient for metering the influx of therapeutic agent into the body of the patient. The pharmaceutical composition comprising the bispecific single chain antibodies directed against and generated against context-independent CD3 epitopes of the invention can be administered by using said pump systems. Such pump systems are generally known in the art, and commonly rely on periodic exchange of cartridges containing the therapeutic agent to be infused. When exchanging the cartridge in such a pump system, a temporary interruption of the otherwise uninterrupted flow of therapeutic agent into the body of the patient may ensue. In such a case, the phase of administration prior to cartridge replacement and the phase of administration following cartridge replacement would still be considered within the meaning of the pharmaceutical means and methods of the invention together make up one “uninterrupted administration” of such therapeutic agent. The continuous or uninterrupted administration of these bispecific single chain antibodies directed against and generated against context-independent CD3 epitopes of this invention may be intravenuous or subcutaneous by way of a fluid delivery device or small pump system including a fluid driving mechanism for driving fluid out of a reservoir and an actuating mechanism for actuating the driving mechanism. Pump systems for subcutaneous administration may include a needle or a cannula for penetrating the skin of a patient and delivering the suitable composition into the patient's body. Said pump systems may be directly fixed or attached to the skin of the patient independently of a vein, artery or blood vessel, thereby allowing a direct contact between the pump system and the skin of the patient. The pump system can be attached to the skin of the patient for 24 hours up to several days. The pump system may be of small size with a reservoir for small volumes. As a non-limiting example, the volume of the reservoir for the suitable pharmaceutical composition to be administered can be between 0.1 and 50 ml.

[0177] The continuous administration may be transdermal by way of a patch worn on the skin and replaced at intervals. One of skill in the art is aware of patch systems for drug delivery suitable for this purpose. It is of note that transdermal administration is especially amenable to uninterrupted administration, as exchange of a first exhausted patch can advantageously be accomplished simultaneously with the placement of a new, second patch, for example on the surface of the skin immediately adjacent to the first exhausted patch and immediately prior to removal of the first exhausted patch. Issues of flow interruption or power cell failure do not arise.

[0178] The composition of the present invention, comprising in particular bispecific single chain antibodies directed against and generated against context-independent CD3 epitopes may further comprise a pharmaceutically acceptable carrier. Examples of suitable pharmaceutical carriers are well known in the art and include solutions, e.g. phosphate buffered saline solutions, water, emulsions, such as oil/water emulsions, various types of wetting agents, sterile solutions, liposomes, etc. Compositions comprising such carriers can be formulated by well known conventional methods. Formulations can comprise carbohydrates, buffer solutions, amino acids and/or surfactants. Carbohydrates may be non-reducing sugars, preferably trehalose, sucrose, octasulfate, sorbitol or xylitol. Such formulations may be used for continuous administrations which may be intravenuous or subcutaneous with and/or without pump systems. Amino acids may be charged amino acids, preferably lysine, lysine acetate, arginine, glutamate and/or histidine. Surfactants may be detergents, preferably with a molecular weight of >1.2 KD and/or a polyether, preferably with a molecular weight of >3 KD. Non-limiting examples for preferred detergents are Tween 20, Tween 40, Tween 60, Tween 80 or Tween 85. Non-limiting examples for preferred polyethers are PEG 3000, PEG 3350, PEG 4000 or PEG 5000. Buffer systems used in the present invention can have a preferred pH of 5-9 and may comprise citrate, succinate, phosphate, histidine and acetate. The compositions of the present invention can be administered to the subject at a suitable dose which can be determined e.g. by dose escalating studies by administration of increasing doses of the bispecific single chain antibody molecule of the invention exhibiting cross-species specificity described herein to non-chimpanzee primates, for instance macaques. As set forth above, the bispecific single chain antibody molecule of the invention exhibiting cross-species specificity described herein can be advantageously used in identical form in preclinical testing in non-chimpanzee primates and as drug in humans. These compositions can also be administered in combination with other proteinaceous and non-proteinaceous drugs. These drugs may be administered simultaneously with the composition comprising the bispecific single chain antibody molecule of the invention as defined herein or separately before or after administration of said polypeptide in timely defined intervals and doses. The dosage regimen will be determined by the attending physician and clinical factors. As is well known in the medical arts, dosages for any one patient depend upon many factors, including the patient's size, body surface area, age, the particular compound to be administered, sex, time and route of administration, general health, and other drugs being administered concurrently. Preparations for parenteral administration include sterile aqueous or non-aqueous solutions, suspensions, and emulsions. Examples of non-aqueous solvents are propylene glycol, polyethylene glycol, vegetable oils such as olive oil, and injectable organic esters such as ethyl oleate. Aqueous carriers include water, alcoholic/aqueous solutions, emulsions or suspensions, including saline and buffered media. Parenteral vehicles include sodium chloride solution, Ringer's dextrose, dextrose and sodium chloride, lactated Ringer's, or fixed oils. Intravenous vehicles include fluid and nutrient replenishers, electrolyte replenishers (such as those based on Ringer's dextrose), and the like. Preservatives and other additives may also be present such as, for example, antimicrobials, anti-oxidants, chelating agents, inert gases and the like. In addition, the composition of the present invention might comprise proteinaceous carriers, like, e.g., serum albumin or immunoglobulin, preferably of human origin. It is envisaged that the composition of the invention might comprise, in addition to the bispecific single chain antibody molecule of the invention defined herein, further biologically active agents, depending on the intended use of the composition. Such agents might be drugs acting on the gastro-intestinal system, drugs acting as cytostatica, drugs preventing hyperurikemia, drugs inhibiting immunoreactions (e.g. corticosteroids), drugs modulating the inflammatory response, drugs acting on the circulatory system and/or agents such as cytokines known in the art.

[0179] The biological activity of the pharmaceutical composition defined herein can be determined for instance by cytotoxicity assays, as described in the following examples, in WO 99/54440 or by Schlereth et al. (Cancer Immunol. Immunother. 20 (2005), 1-12). “Efficacy” or “in vivo efficacy” as used herein refers to the response to therapy by the pharmaceutical composition of the invention, using e.g. standardized NCI response criteria. The success or in vivo efficacy of the therapy using a pharmaceutical composition of the invention refers to the effectiveness of the composition for its intended purpose, i.e. the ability of the composition to cause its desired effect, i.e. depletion of pathologic cells, e.g. tumor cells. The in vivo efficacy may be monitored by established standard methods for the respective disease entities including, but not limited to white blood cell counts, differentials, Fluorescence Activated Cell Sorting, bone marrow aspiration. In addition, various disease specific clinical chemistry parameters and other established standard methods may be used. Furthermore, computer-aided tomography, X-ray, nuclear magnetic resonance tomography (e.g. for National Cancer Institute-criteria based response assessment [Cheson B D, Horning S J, Coiffier B, Shipp M A, Fisher R I, Connors J M, Lister T A, Vose J, Grillo-Lopez A, Hagenbeek A, Cabanillas F, Klippensten D, Hiddemann W, Castellino R, Harris N L, Armitage J O, Carter W, Hoppe R, Canellos G P. Report of an international workshop to standardize response criteria for non-Hodgkin's lymphomas. NCI Sponsored International Working Group. J Clin Oncol. 1999 April; 17(4):1244]), positron-emission tomography scanning, white blood cell counts, differentials, Fluorescence Activated Cell Sorting, bone marrow aspiration, lymph node biopsies/histologies, and various cancer specific clinical chemistry parameters (e.g. lactate dehydrogenase) and other established standard methods may be used.

[0180] Another major challenge in the development of drugs such as the pharmaceutical composition of the invention is the predictable modulation of pharmacokinetic properties. To this end, a pharmacokinetic profile of the drug candidate, i.e. a profile of the pharmacokinetic parameters that effect the ability of a particular drug to treat a given condition, is established. Pharmacokinetic parameters of the drug influencing the ability of a drug for treating a certain disease entity include, but are not limited to: half-life, volume of distribution, hepatic first-pass metabolism and the degree of blood serum binding. The efficacy of a given drug agent can be influenced by each of the parameters mentioned above.

[0181] “Half-life” means the time where 50% of an administered drug are eliminated through biological processes, e.g. metabolism, excretion, etc.

[0182] By “hepatic first-pass metabolism” is meant the propensity of a drug to be metabolized upon first contact with the liver, i.e. during its first pass through the liver. “Volume of distribution” means the degree of retention of a drug throughout the various compartments of the body, like e.g. intracellular and extracellular spaces, tissues and organs, etc. and the distribution of the drug within these compartments. “Degree of blood serum binding” means the propensity of a drug to interact with and bind to blood serum proteins, such as albumin, leading to a reduction or loss of biological activity of the drug.

[0183] Pharmacokinetic parameters also include bioavailability, lag time (Tlag), Tmax, absorption rates, more onset and/or Cmax for a given amount of drug administered. “Bioavailability” means the amount of a drug in the blood compartment.

[0184] “Lag time” means the time delay between the administration of the drug and its detection and measurability in blood or plasma.

[0185] “Tmax” is the time after which maximal blood concentration of the drug is reached, and “Cmax” is the blood concentration maximally obtained with a given drug. The time to reach a blood or tissue concentration of the drug which is required for its biological effect is influenced by all parameters. Pharmacokinetik parameters of bispecific single chain antibodies exhibiting cross-species specificity, which may be determined in preclinical animal testing in non-chimpanzee primates as outlined above are also set forth e.g. in the publication by Schlereth et al. (Cancer Immunol. Immunother. 20 (2005), 1-12).

[0186] The term “toxicity” as used herein refers to the toxic effects of a drug manifested in adverse events or severe adverse events. These side events might refer to a lack of tolerability of the drug in general and/or a lack of local tolerance after administration. Toxicity could also include teratogenic or carcinogenic effects caused by the drug.

[0187] The term “safety”, “in vivo safety” or “tolerability” as used herein defines the administration of a drug without inducing severe adverse events directly after administration (local tolerance) and during a longer period of application of the drug. “Safety”, “in vivo safety” or “tolerability” can be evaluated e.g. at regular intervals during the treatment and follow-up period. Measurements include clinical evaluation, e.g. organ manifestations, and screening of laboratory abnormalities. Clinical evaluation may be carried out and deviating to normal findings recorded/coded according to NCI-CTC and/or MedDRA standards. Organ manifestations may include criteria such as allergy/immunology, blood/bone marrow, cardiac arrhythmia, coagulation and the like, as set forth e.g. in the Common Terminology Criteria for adverse events v3.0 (CTCAE). Laboratory parameters which may be tested include for instance haematology, clinical chemistry, coagulation profile and urine analysis and examination of other body fluids such as serum, plasma, lymphoid or spinal fluid, liquor and the like. Safety can thus be assessed e.g. by physical examination, imaging techniques (i.e. ultrasound, x-ray, CT scans, Magnetic Resonance Imaging (MRI), other measures with technical devices (i.e. electrocardiogram), vital signs, by measuring laboratory parameters and recording adverse events. For example, adverse events in non-chimpanzee primates in the uses and methods according to the invention may be examined by histopathological and/or histochemical methods.

[0188] The term “effective and non-toxic dose” as used herein refers to a tolerable dose of the bispecific single chain antibody as defined herein which is high enough to cause depletion of pathologic cells, tumor elimination, tumor shrinkage or stabilization of disease without or essentially without major toxic effects. Such effective and non-toxic doses may be determined e.g. by dose escalation studies described in the art and should be below the dose inducing severe adverse side events (dose limiting toxicity, DLT).

[0189] The above terms are also referred to e.g. in the Preclinical safety evaluation of biotechnology-derived pharmaceuticals S6; ICH Harmonised Tripartite Guideline; ICH Steering Committee meeting on Jul. 16, 1997.

[0190] Moreover, the invention relates to a pharmaceutical composition comprising a bispecific single chain antibody molecule of this invention or produced according to the process according to the invention for the prevention, treatment or amelioration of cancer. Preferably, said pharmaceutical composition further comprises suitable formulations of carriers, stabilizers and/or excipients.

[0191] A further aspect of the invention relates to a use of a bispecific single chain antibody molecule/polypeptide as defined herein above or produced according to a process defined herein above, for the preparation of a pharmaceutical composition for the prevention, treatment or amelioration of a disease. Preferably, said disease is cancer.

[0192] In another preferred embodiment of use of the bispecific single chain antibody molecule of the invention said pharmaceutical composition is suitable to be administered in combination with an additional drug, i.e. as part of a co-therapy. In said co-therapy, an active agent may be optionally included in the same pharmaceutical composition as the bispecific single chain antibody molecule of the invention, or may be included in a separate pharmaceutical composition. In this latter case, said separate pharmaceutical composition is suitable for administration prior to, simultaneously as or following administration of said pharmaceutical composition comprising the bispecific single chain antibody molecule of the invention. The additional drug or pharmaceutical composition may be a non-proteinaceous compound or a proteinaceous compound. In the case that the additional drug is a proteinaceous compound, it is advantageous that the proteinaceous compound be capable of providing an activation signal for immune effector cells.

[0193] Preferably, said proteinaceous compound or non-proteinaceous compound may be administered simultaneously or non-simultaneously with the bispecific single chain antibody molecule of the invention, a nucleic acid molecule as defined hereinabove, a vector as defined as defined hereinabove, or a host as defined as defined hereinabove.

[0194] Another aspect of the invention relates to a method for the prevention, treatment or amelioration of a disease in a subject in the need thereof, said method comprising the step of administration of an effective amount of a pharmaceutical composition of the invention. Preferably, said disease is cancer.

[0195] In another preferred embodiment of the method of the invention said pharmaceutical composition is suitable to be administered in combination with an additional drug, i.e. as part of a co-therapy. In said co-therapy, an active agent may be optionally included in the same pharmaceutical composition as the bispecific single chain antibody molecule of the invention, or may be included in a separate pharmaceutical composition. In this latter case, said separate pharmaceutical composition is suitable for administration prior to, simultaneously as or following administration of said pharmaceutical composition comprising the bispecific single chain antibody molecule of the invention. The additional drug or pharmaceutical composition may be a non-proteinaceous compound or a proteinaceous compound. In the case that the additional drug is a proteinaceous compound, it is advantageous that the proteinaceous compound be capable of providing an activation signal for immune effector cells.

[0196] Preferably, said proteinaceous compound or non-proteinaceous compound may be administered simultaneously or non-simultaneously with the bispecific single chain antibody molecule of the invention, a nucleic acid molecule as defined hereinabove, a vector as defined as defined hereinabove, or a host as defined as defined hereinabove.

[0197] It is preferred for the above described method of the invention that said subject is a human.

[0198] In a further aspect, the invention relates to a kit comprising a bispecific single chain antibody molecule of the invention, a nucleic acid molecule of the invention, a vector of the invention, or a host of the invention.

[0199] These and other embodiments are disclosed and encompassed by the description and Examples of the present invention. Recombinant techniques and methods in immunology are described e.g. in Sambrook et al. Molecular Cloning: A Laboratory Manual; Cold Spring Harbor Laboratory Press, 3^{rd} edition 2001; Lefkovits; Immunology Methods Manual; The Comprehensive Sourcebook of Techniques; Academic Press, 1997; Golemis; Protein-Protein Interactions: A Molecular Cloning Manual; Cold Spring Laboratory Press, 2002. Further literature concerning any one of the antibodies, methods, uses and compounds to be employed in accordance with the present invention may be retrieved from public libraries and databases, using for example electronic devices. For example, the public database “Medline”, available on the Internet, may be utilized, for example under http://www.ncbi.nlm.nih.gov/PubMed/medline.html. Further databases and addresses such as http://www.ncbi.nlm.nih.gov/ or listed at the EMBL-services homepage under http://www.embl.de/services/index.html are known to the person skilled in the art and can also be obtained using, e.g., http://www.google.com.

[0200] The figures show:

[0201] FIG. 1

[0202] Fusion of the N-terminal amino acids 1-27 of primate CD3 epsilon to a heterologous soluble protein.

[0203] FIG. 2

[0204] The figure shows the average absorption values of quadruplicate samples measured in an ELISA assay detecting the presence of a construct consisting of the N-terminal amino acids 1-27 of the mature human CD3 epsilon chain fused to the hinge and Fc gamma portion of human IgG1 and a C-terminal 6 Histidine tag in a supernatant of transiently transfected 293 cells. The first column labeled “27 aa huCD3E” shows the average absorption value for the construct, the second column labeled “irrel. SN” shows the average value for a supernatant of 293 cells transfected with an irrelevant construct as negative control. The comparison of the values obtained for the construct with the values obtained for the negative control clearly demonstrates the presence of the recombinant construct.

[0205] FIG. 3

[0206] The figure shows the average absorption values of quadruplicate samples measured in an ELISA assay detecting the binding of the cross species specific anti-CD3 binding molecules in form of crude preparations of periplasmatically expressed single-chain antibodies to a construct comprising the N-terminal 1-27 amino acids of the mature human CD3 epsilon chain fused to the hinge and Fc gamma portion of human IgG1 and a C-terminal His6 tag. The columns show from left to right the average absorption values for the specificities designated as A2J HLP, I2C HLP E2M HLP, F7O HLP, G4H HLP, H2C HLP, E1L HLP, F12Q HLP, F6A HLP and H1E HLP. The rightmost column labelled “neg. contr.” shows the average absorption value for the single-chain preparation of a murine anti-human CD3 antibody as negative control. The comparison of the values obtained for the anti-CD3 specificities with the values obtained for the negative control clearly demonstrates the strong binding of the anti-CD3 specificities to the N-terminal 1-27 amino acids of the mature human CD3 epsilon chain.

[0207] FIG. 4

[0208] Fusion of the N-terminal amino acids 1-27 of primate CD3 epsilon to a heterologous membrane bound protein.

[0209] FIG. 5

[0210] Histogram overlays of different transfectants tested in a FACS assay detecting the presence of recombinant transmembrane fusion proteins consisting of cynomolgus EpCAM and the N-terminal 1-27 amino acids of the human, marmoset, tamarin, squirrel monkey and domestic swine CD3 epsilon chain respectively. The histogram overlays from left to right and top to bottom show the results for the transfectants expressing the constructs comprising the human 27 mer, marmoset 27 mer, tamarin 27 mer, squirrel monkey 27 mer and swine 27 mer respectively. In the individual overlays the thin line represents a sample incubated with PBS with 2% FCS instead of anti-Flag M2 antibody as negative control and the bold line shows a sample incubated with the anti-Flag M2 antibody. For each construct the overlay of the histograms shows binding of the anti-Flag M2 antibody to the transfectants, which clearly demonstrates the expression of the recombinant constructs on the transfectants.

[0211] FIG. 6

[0212] Histogram overlays of different transfectants tested in a FACS assay detecting the binding of the cross-species specific anti-CD3 binding molecules in form of crude preparations of periplasmatically expressed single-chain antibodies to the N-terminal amino acids 1-27 of the human, marmoset, tamarin and squirrel monkey CD3 epsilon chain respectively fused to cynomolgus EpCAM.

[0213] FIG. 6A:

[0214] The histogram overlays from left to right and top to bottom show the results for the transfectants expressing the 1-27 CD3-EpCAM comprising the human 27 mer tested with the CD3 specific binding molecules designated H2C HLP, F12Q HLP, E2M HLP and G4H HLP respectively.

[0215] FIG. 6B:

[0216] The histogram overlays from left to right and top to bottom show the results for the transfectants expressing the 1-27 CD3-EpCAM comprising the marmoset 27 mer tested with the CD3 specific binding molecules designated H2C HLP, F12Q HLP, E2M HLP and G4H HLP respectively.

[0217] FIG. 6C:

[0218] The histogram overlays from left to right and top to bottom show the results for the transfectants expressing the 1-27 CD3-EpCAM comprising the tamarin 27 mer tested with the CD3 specific binding molecules designated H2C HLP, F12Q HLP, E2M HLP and G4H HLP respectively.

[0219] FIG. 6D:

[0220] The histogram overlays from left to right and top to bottom show the results for the transfectants expressing the 1-27 CD3-EpCAM comprising the squirrel monkey 27 mer tested with the CD3 specific binding molecules designated H2C HLP, F12Q HLP, E2M HLP and G4H HLP respectively.

[0221] FIG. 6E:

[0222] The histogram overlays from left to right and top to bottom show the results for the transfectants expressing the 1-27 CD3-EpCAM comprising the swine 27 mer tested with the CD3 specific binding molecules designated H2C HLP, F12Q HLP, E2M HLP and G4H HLP respectively.

[0223] In the individual overlays the thin line represents a sample incubated with a single-chain preparation of a murine anti-human CD3-antibody as negative control and the bold line shows a sample incubated with the respective anti-CD3 binding molecules indicated. Considering the lack of binding to the swine 27 mer transfectants and the expression levels of the constructs shown in FIG. 5 the overlays of the histograms show specific and strong binding of the tested anti-CD3 specificities of the fully cross-species specific human bispecific single chain antibodies to cells expressing the recombinant transmembrane fusion proteins comprising the N-terminal amino acids 1-27 of the human, marmoset, tamarin and squirrel monkey CD3 epsilon chain respectively fused to cynomolgus EpCAM and show therefore multi primate cross-species specificity of the anti-CD3 binding molecules.

[0224] FIG. 7

[0225] FACS assay for detection of human CD3 epsilon on transfected murine EL4 T cells. Graphical analysis shows an overlay of histograms. The bold line shows transfected cells incubated with the anti-human CD3 antibody UCHT-1. The thin line represents cells incubated with a mouse IgG1 isotype control. Binding of the anti CD3 antibody UCHT1 clearly shows expression of the human CD3 epsilon chain on the cell surface of transfected murine EL4 T cells.

[0226] FIG. 8

[0227] Binding of cross-species specific anti CD3 antibodies to alanine-mutants in an alanine scanning experiment. In the individual Figures the columns show from left to right the calculated binding values in arbitrary units in logarithmic scale for the wild-type transfectant (WT) and for all alanine-mutants from the position 1 to 27. The binding values are calculated using the following formula:

$$value\_Sample ( x , y ) = \frac{Sample ( x , y ) - neg\_Contr . ( x )}{\begin{matrix}( U C H T - 1 ( x ) - neg\_Contr . ( x ) ) * \\ \frac{WT ( y ) - neg\_Contr . ( wt )}{U C H T - 1 ( wt ) - neg\_Contr . ( wt )}\end{matrix}}$$

[0228] In this equation value_Sample means the value in arbitrary units of binding depicting the degree of binding of a specific anti-CD3 antibody to a specific alanine-mutant as shown in the Figure, Sample means the geometric mean fluorescence value obtained for a specific anti-CD3 antibody assayed on a specific alanine-scanning transfectant, neg_Contr. means the geometric mean fluorescence value obtained for the negative control assayed on a specific alanine-mutant, UCHT-1 means the geometric mean fluorescence value obtained for the UCHT-1 antibody assayed on a specific alanine-mutant, WT means the geometric mean fluorescence value obtained for a specific anti-CD3 antibody assayed on the wild-type transfectant, x specifies the respective transfectant, y specifies the respective anti-CD3 antibody and wt specifies that the respective transfectant is the wild-type. Individual alanine-mutant positions are labelled with the single letter code of the wild-type amino acid and the number of the position.

[0229] FIG. 8A:

[0230] The figure shows the results for cross-species specific anti CD3 antibody A2J HLP expressed as chimeric IgG molecule. Reduced binding activity is observed for mutations to alanine at position 4 (asparagine), at position 23 (threonine) and at position 25 (isoleucine). Complete loss of binding is observed for mutations to alanine at position 1 (glutamine), at position 2 (aspartate), at position 3 (glycine) and at position 5 (glutamate).

[0231] FIG. 8B:

[0232] The figure shows the results for cross-species specific anti CD3 antibody E2M HLP, expressed as chimeric IgG molecule. Reduced binding activity is observed for mutations to alanine at position 4 (asparagine), at position 23 (threonine) and at position 25 (isoleucine). Complete loss of binding is observed for mutations to alanine at position 1 (glutamine), at position 2 (aspartate), at position 3 (glycine) and at position 5 (glutamate).

[0233] FIG. 8C:

[0234] The figure shows the results for cross-species specific anti CD3 antibody H2C HLP, expressed as chimeric IgG molecule. Reduced binding activity is observed for mutations to alanine at position 4 (asparagine). Complete loss of binding is observed for mutations to alanine glutamine at position 1 (glutamine), at position 2 (aspartate), at position 3 (glycine) and at position 5 (glutamate).

[0235] FIG. 8D:

[0236] shows the results for cross-species specific anti CD3 antibody F12Q HLP, tested as periplasmatically expressed single-chain antibody. Complete loss of binding is observed for mutations to alanine at position 1 (glutamine), at position 2 (aspartate), at position 3 (glycine) and at position 5 (glutamate).

[0237] FIG. 9

[0238] FACS assay detecting the binding of the cross-species specific anti-CD3 binding molecule H2C HLP to human CD3 with and without N-terminal His6 tag.

[0239] Histogram overlays are performed of the EL4 cell line transfected with wild-type human CD3 epsilon chain (left histogram) or the human CD3 epsilon chain with N-terminal His 6 tag (right histogram) tested in a FACS assay detecting the binding of cross-species specific binding molecule H2C HLP. Samples are incubated with an appropriate isotype control as negative control (thin line), anti-human CD3 antibody UCHT-1 as positive control (dotted line) and cross-species specific anti-CD3 antibody H2C HLP in form of a chimeric IgG molecule (bold line).

[0240] Histogram overlays show comparable binding of the UCHT-1 antibody to both transfectants as compared to the isotype control demonstrating expression of both recombinant constructs. Histogram overlays also show binding of the anti-CD3 binding molecule H2C HLP only to the wild-type human CD3 epsilon chain but not to the His6-human CD3 epsilon chain. These results demonstrate that a free N-terminus is essential for binding of the cross-species specific anti-CD3 binding molecule H2C HLP.

[0241] FIG. 10

[0242] FACS binding analysis of designated cross-species specific bispecific single chain constructs to CHO cells transfected with the human MCSP D3, human CD3+ T cell line HPB-ALL, CHO cells transfected with cynomolgus MCSP D3 and a macaque T cell line 4119 LnPx. The FACS staining is performed as described in Example 10. The thick line represents cells incubated with 2 μg/ml purified protein that are subsequently incubated with the anti-his antibody and the PE labeled detection antibody. The thin histogram line reflects the negative control: cells only incubated with the anti-his antibody and the detection antibody.

[0243] FIG. 11

[0244] FACS binding analysis of designated cross-species specific bispecific single chain constructs CHO cells transfected with the human MCSP D3, human CD3+ T cell line HPB-ALL, CHO cells transfected with cynomolgus MCSP D3 and a macaque T cell line 4119 LnPx. The FACS staining is performed as described in Example 10. The thick line represents cells incubated with 2 μg/ml purified protein that are subsequently incubated with the anti-his antibody and the PE labeled detection antibody. The thin histogram line reflects the negative control: cells only incubated with the anti-his antibody and the detection antibody.

[0245] FIG. 12

[0246] FACS binding analysis of designated cross-species specific bispecific single chain constructs CHO cells transfected with the human MCSP D3, human CD3+ T cell line HPB-ALL, CHO cells transfected with cynomolgus MCSP D3 and a macaque T cell line 4119 LnPx. The FACS staining is performed as described in Example 10. The thick line represents cells incubated with 2 μg/ml purified monomeric protein that are subsequently incubated with the anti-his antibody and the PE labeled detection antibody. The thin histogram line reflects the negative control: cells only incubated with the anti-his antibody and the detection antibody.

[0247] FIG. 13

[0248] Cytotoxicity activity induced by designated cross-species specific MCSP specific single chain constructs redirected to indicated target cell lines. A) Stimulated CD4-/CD56-human PBMCs are used as effector cells, CHO cells transfected with human MCSP D3 as target cells. B) The macaque T cell line 4119 LnPx are used as effector cells, CHO cells transfected with cynomolgus MCSP D3 as target cells. The assay is performed as described in Example 11.

[0249] FIG. 14

[0250] Cytotoxicity activity induced by designated cross-species specific MCSP specific single chain constructs redirected to indicated target cell lines. A) and B) The macaque T cell line 4119 LnPx are used as effector cells, CHO cells transfected with cynomolgus MCSP D3 as target cells. The assay is performed as described in Example 11.

[0251] FIG. 15

[0252] Cytotoxicity activity induced by designated cross-species specific MCSP specific single chain constructs redirected to indicated target cell lines. A) and B) Stimulated CD4-/CD56-human PBMCs are used as effector cells, CHO cells transfected with human MCSP D3 as target cells. The assay is performed as described in Example 11.

[0253] FIG. 16

[0254] Cytotoxicity activity induced by designated cross-species specific MCSP specific single chain constructs redirected to indicated target cell lines. A) Stimulated CD4-/CD56-human PBMCs are used as effector cells, CHO cells transfected with human MCSP D3 as target cells. B) The macaque T cell line 4119 LnPx are used as effector cells, CHO cells transfected with cynomolgus MCSP D3 as target cells. The assay is performed as described in Example 11.

[0255] FIG. 17

[0256] Cytotoxicity activity induced by designated cross-species specific MCSP specific single chain constructs redirected to indicated target cell lines. A) Stimulated CD4-/CD56-human PBMCs are used as effector cells, CHO cells transfected with human MCSP D3 as target cells. B) The macaque T cell line 4119 LnPx are used as effector cells, CHO cells transfected with cynomolgus MCSP D3 as target cells. The assay is performed as described in Example 11.

[0257] FIG. 18

[0258] Plasma stability of MCSP and CD3 cross-species specific bispecific single chain antibodies tested by the measurement of cytotoxicity activity induced by samples of the designated single chain constructs incubated with 50% human plasma at 37° C. and 4° C. for 24 hours respectively or with addition of 50% human plasma immediately prior to cytotoxicity testing or without addition of plasma. CHO cells transfected with human MCSP are used as target cell line and stimulated CD4-/CD56-human PBMCs are used as effector cells. The assay is performed as described in Example 12.

[0259] FIG. 19

[0260] Initial drop and recovery (i.e. redistribution) of absolute T cell counts (open squares), in peripheral blood of B-NHL patients (patent numbers 1, 7, 23, 30, 31, and 33 of Table 4), who had essentially no circulating CD19-positive target B cells (filled triangles), during the starting phase of intravenous infusion with the CD3 binding molecule CD19×CD3 recognizing a conventional context dependent CD3 epitope. Absolute cell counts are given in 1000 cells per microliter blood. The first data point shows baseline counts immediately prior to the start of infusion. The CD19×CD3 dose is given in parentheses beside the patient number.

[0261] FIG. 20

[0262] (A) Repeated T cell redistribution (open squares) in B-NHL patient #19 (Table 4) who had no circulating CD19-positive target B cells (filled triangles) and developed CNS symptoms under continuous intravenous infusion with CD19×CD3 at a starting dose of 5 μg/m²/24 h for one day followed by a sudden dose increase to 15 μg/m²/24 h. Absolute cell counts are given in 1000 cells per microliter blood. The first data point shows baseline counts immediately prior to the start of infusion. After recovery of circulating T cells from the first episode of redistribution triggered by the treatment start at 5 μg/m²/24 h the stepwise dose increase from 5 to 15 μg/m²/24 h triggered a second episode of T cell redistribution that was associated with the development of CNS symptoms dominated by confusion and disorientation.

[0263] (B) Repeated T cell redistribution in a B-NHL patient, who developed CNS symptoms under repeated intravenous bolus infusion with CD19×CD3 at 1.5 μg/m². Absolute cell counts are given in 1000 cells per microliter blood. The infusion time for each bolus administration was 2 to 4 hours. Vertical arrows indicate the start of bolus infusions. Data points at the beginning of each bolus administration show the T cell counts immediately prior to start of bolus infusion. Each bolus infusion triggered an episode of T cell redistribution followed by recovery of the T cell counts prior to the next bolus infusion. Finally the third episode of T cell redistribution was associated with the development of CNS symptoms in this patient.

[0264] FIG. 21

[0265] Complex T cell redistribution pattern (open squares) in B-NHL patient #20 (Table 4) without circulating CD19-positive target B cells (filled triangles), during ramp initiation of the CD19×CD3 infusion i.e. even gradual increase of flow-rate from almost zero to 15 μg/m²/24 h during the first 24 hours of treatment. Absolute cell counts are given in 1000 cells per microliter blood. The first data point shows baseline counts immediately prior to the start of infusion. The CD19×CD3 dose is given in parentheses beside the patient number. T cells reappearing in the circulating blood after the initial redistribution triggered by the first exposure to CD19×CD3 are partially induced to redisappear from circulating blood again by still increasing levels of CD19×CD3 during the ramp phase.

[0266] FIG. 22

[0267] T and B cell counts during treatment with CD19×CD3 of B-NHL patient #13 (Table 4) who had a significant number of circulating CD19-positive target B (lymphoma) cells (filled triangles). Absolute cell counts are given in 1000 cells per microliter blood. The first data point shows baseline counts immediately prior to the start of infusion. The CD19×CD3 dose is given in parentheses beside the patient number. T cells (open squares) disappear completely from the circulation upon start of CD19×CD3 infusion and do not reappear until the circulating CD19-positive B (lymphoma) cells (filled triangles) are depleted from the peripheral blood.

[0268] FIG. 23

[0269] Repeated T cell redistribution (open squares) in B-NHL patient #24 (Table 4), who had essentially no circulating CD19-positive target B cells (filled triangles) and developed CNS symptoms upon initiation of CD19×CD3 infusion without additional HSA as required for stabilisation of the drug (upper panel). After first recovery of circulating T cells from initial redistribution the uneven drug flow due to the lack of stabilizing HSA triggered a second episode of T cell redistribution that was associated with the development of CNS symptoms dominated by confusion and disorientation. When the same patient was restarted correctly with CD19×CD3 solution containing additional HSA for drug stabilisation, no repeated T cell redistribution was observed (lower panel) and the patient did not again develop any CNS symptoms. Absolute cell counts are given in 1000 cells per microliter blood. The first data point shows baseline counts immediately prior to the start of infusion. The CD19×CD3 dose is given in parentheses beside the patient number.

[0270] FIG. 24

[0271] Model of T cell adhesion to endothelial cells induced by monovalent binding to context dependent CD3 epitopes. Monovalent interaction of a conventional CD3 binding molecule to its context dependent epitope on CD3 epsilon can lead to an allosteric change in the conformation of CD3 followed by the recruitment of Nck2 to the cytoplasmic domain of CD3 epsilon (Gil et al. (2002) Cell 109: 901). As Nck2 is directly linked to integrins via PINCH and ILK (Legate et al. (2006) Nat Rev Mol Cell Biol 7: 20), recruitment of Nck2 to the cytoplasmic domain of CD3 epsilon following an allosteric change in the conformation of CD3 through binding of a conventional CD3 binding molecule (like the CD19×CD3 of example 13) to its context dependent epitope on CD3 epsilon, can increase the adhesiveness of T cells to endothelial cells by transiently switching integrins on the T cell surface into their more adhesive isoform via inside-out-signalling.

[0272] FIG. 25

[0273] Cytotoxic activity of CD33-AF5 VH-VL×I2C VH-VL test material used for the in vivo study in cynomolgus monkeys as described in Example 14. Specific lysis of CD33-positive target cells was determined in a standard ⁵¹Chromium release assay at increasing concentrations of CD33-AF5 VH-VL×I2C VH-VL. Assay duration was 18 hours. The macaque T cell line 4119 LnPx was used as source of effector cells. CHO cells transfected with cynomolgus CD33 served as target cells. Effector—to target cell ratio (E:T-ratio) was 10:1. The concentration of CD33-AF5 VH-VL×I2C VH-VL required for half-maximal target cell lysis (EC50) was calculated from the dose response curve with a value of 2.7 ng/ml.

[0274] FIG. 26

[0275] (A) Dose- and time-dependent depletion of CD33-positive monocytes from the peripheral blood of cynomolgus monkeys through intravenous continuous infusion of CD33-AF5 VH-VL×I2C VH-VL as described in Example 14. The percentage relative to baseline (i.e. 100%) of absolute circulating CD33-positive monocyte counts after the duration of treatment as indicated above the columns is shown for each of two cynomolgus monkeys per dose level. The dose level (i.e. infusion flow-rate) is indicated below the columns. No depletion of circulating CD33-positive monocytes was observed in animals 1 and 2 treated for 7 days at a dose of 30 μg/m²/24 h. In animals 3 and 4 treated for 7 days at a dose of 60 μg/m²/24 h circulating CD33-positive monocyte counts were reduced to 68% and 40% of baseline, respectively. At 240 μg/m²/24 h circulating CD33-positive monocytes were almost completely depleted from the peripheral blood after 3 days of treatment (animals 5 and 6). At 1000 μg/m²/24 h depletion of circulating CD33-positive monocytes from the peripheral blood was completed already after 1 day of treatment (animals 7 and 8).

[0276] (B) Course of T cell and CD33-monocyte counts in peripheral blood of two cynomolgus monkeys during continuous infusion of CD33-AF5 VH-VL×I2C VH-VL for 14 days at 120 μg/m²/24 h. Absolute cell counts are given in 1000 cells per microliter blood. The first data point shows baseline counts immediately prior to the start of infusion. After initial mobilisation of CD33-monocytes during the first 12 hours upon start of infusion CD33-monocytes in peripheral blood (filled triangles) are depleted by two thirds (animal 10) and 50% (animal 9) relative to the respective baseline counts during the further course of infusion. Circulating T cell counts (open squares) show a limited initial drop followed by recovery still during the presence of circulating CD33-positive monocytic target cells.

[0277] FIG. 27

[0278] Cytotoxic activity of MCSP-G4 VH-VL×I2C VH-VL test material used for the in vivo study in cynomolgus monkeys as described in Example 15. Specific lysis of MCSP-positive target cells was determined in a standard ⁵¹Chromium release assay at increasing concentrations of MCSP-G4 VH-VL×I2C VH-VL. Assay duration was 18 hours. The macaque T cell line 4119 LnPx was used as source of effector cells. CHO cells transfected with cynomolgus MCSP served as target cells. Effector- to target cell ratio (E:T-ratio) was 10:1. The concentration of MCSP-G4 VH-VL×I2C VH-VL required for half-maximal target cell lysis (EC50) was calculated from the dose response curve with a value of 1.9 ng/ml.

[0279] FIG. 28

[0280] Absence of initial episodes of drop and subsequent recovery of absolute T cell counts (i.e. redistribution) in peripheral blood of cynomolgus monkeys during the starting phase of intravenous infusion with the CD3 binding molecule MCSP-G4 VH-VL×I2C VH-VL recognizing an essentially context independent CD3 epitope. Absolute cell counts are given in 1000 cells per microliter blood. The first data point shows baseline counts immediately prior to the start of infusion. The MCSP-G4 VH-VL×I2C VH-VL dose is given in parentheses beside the animal number. In the known absence of MCSP-positive target cells from the circulating blood of cynomolgus monkeys there is no induction of T cell redistribution (i.e. an initial episode of drop and subsequent recovery of absolute T cell counts) through target cell mediated crosslinking of CD3. Moreover, induction of T cell redistribution (i.e. an initial episode of drop and subsequent recovery of absolute T cell counts) through a signal, which the T cells may receive through exclusive interaction with a CD3 binding site only, can be avoided by the use of CD3 binding molecules like MCSP-G4 VH-VL×I2C VH-VL recognizing an essentially context independent CD3 epitope.

[0281] FIG. 29

[0282] FACS binding analysis of designated cross-species specific bispecific constructs to CHO cells transfected with human CD33, the human CD3+ T cell line HPB-ALL, CHO cells transfected with macaque CD33 and macaque PBMC respectively. The FACS staining is performed as described in Example 16.4. The bold lines represent cells incubated with 5 μg/ml purified bispecific single chain construct or cell culture supernatant of transfected cells expressing the cross-species specific bispecific antibody constructs. The filled histograms reflect the negative controls. Supernatant of untransfected CHO cells was used as negative control. For each cross-species specific bispecific single chain construct the overlay of the histograms shows specific binding of the construct to human and macaque CD33 and human and macaque CD3.

[0283] FIG. 30

[0284] The diagrams show results of chromium release assays measuring cytotoxic activity induced by designated cross-species specific CD33 specific single chain constructs redirected to the indicated target cell lines. Effector cells were also used as indicated. The assays are performed as described in Example 16.5. The diagrams clearly demonstrate for each construct the potent recruitment of cytotoxic activity of human and macaque effector cells against human and macaque CD33 transfected CHO cells, respectively.

[0285] FIG. 31

[0286] SDS PAGE gel and Western blot monitoring the purification of the cross-species specific bispecific single chain molecule designated E292F3 HL×I2C HL. Samples from the eluate, the cell culture supernatant (SN) and the flow through of the column (FT) were analyzed as indicated. A protein marker (M) was applied as size reference. A strong protein band with a molecular weight between 50 and 60 kDa in the SDS PAGE gel demonstrates the efficient purification of the cross-species specific bispecific single chain molecule to a very high degree of purity with the one-step purification method described in Example 17.2. The Western blot detecting the histidine₆ tag confirms the identity of the protein band in the eluate as the cross-species specific bispecific single chain molecule. The faint signal for the flow through sample in this sensitive detection method further shows the nearly complete capture of bispecific single chain molecules by the purification method.

[0287] FIG. 32

[0288] SDS PAGE gel and Western blot monitoring the purification of the cross-species specific bispecific single chain molecule designated V207C12 HL×H2C HL. Samples from the eluate, the cell culture supernatant (SN) and the flow through of the column (FT) were analyzed as indicated. A protein marker (M) was applied as size reference. A strong protein band with a molecular weight between 50 and 60 kDa in the SDS PAGE gel demonstrates the efficient purification of the cross-species specific bispecific single chain molecule to a very high degree of purity with the one-step purification method described in Example 17.2. The Western blot detecting the histidine₆ tag confirms the identity of the protein band in the eluate as the cross-species specific bispecific single chain molecule. The faint signal for the flow through sample in this sensitive detection method further shows the nearly complete capture of bispecific single chain molecules by the purification method.

[0289] FIG. 33

[0290] SDS PAGE gel and Western blot monitoring the purification of the cross-species specific bispecific single chain molecule designated AF5HL×F12QHL. Samples from the eluate, the cell culture supernatant (SN) and the flow through of the column (FT) were analyzed as indicated. A protein marker (M) was applied as size reference. A strong protein band with a molecular weight between 50 and 60 kDa in the SDS PAGE gel demonstrates the efficient purification of the cross-species specific bispecific single chain molecule to a very high degree of purity with the one-step purification method described in Example 17.2. The Western blot detecting the histidine₆ tag confirms the identity of the protein band in the eluate as the cross-species specific bispecific single chain molecule. The signal in the flow through sample in this sensitive detection method is explained by saturation of the affinity column due to the high concentration of bispecific single chain molecules in the supernatant.

[0291] FIG. 34

[0292] Standard curve of AF5HL×I2CHL in 50% macaque monkey serum. The upper diagram shows the standard curve generated for the assay as described in Example 18.2.

[0293] The lower diagram shows results for quality control samples of AF5HL×I2CHL in 50% macaque monkey serum. The recovery rates are above 90% for the high and mid QC sample and above 80% for the low QC sample.

[0294] Thus the assay allows for detection of AF5HL×I2CHL in serum samples in the range from 10 ng/ml to 200 ng/ml (before dilution).

[0295] FIG. 35

[0296] Standard curve of MCSP-G4 HL×I2C HL in 50% macaque monkey serum. The upper diagram shows the standard curve generated for the assay as described in Example 18.2.

[0297] The lower diagram shows results for quality control samples of MCSP-G4 HL×I2C HL in 50% macaque monkey serum. The recovery rates are above 98% for the high and mid QC sample and above 85% for the low QC sample.

[0298] Thus the assay allows for detection of MCSP-G4 HL×I2C HL in serum samples in the range from 10 ng/ml to 200 ng/ml (before dilution).

[0299] FIG. 36

[0300] FACS binding analysis of an anti-Flag antibody to CHO cells transfected with the 1-27 N-terminal amino acids of CD3 epsilon of the designated species fused to cynomolgus EpCAM. The FACS staining was performed as described in Example 19.1. The bold lines represent cells incubated with the anti-Flag antibody. The filled histograms reflect the negative controls. PBS with 2% FCS was used as negative control. The histograms show strong and comparable binding of the anti-Flag antibody to all transfectants indicating strong and equal expression of the transfected constructs.

[0301] FIG. 37

[0302] FACS binding analysis of the I2C IgG1 construct to CHO cells expressing the 1-27 N-terminal amino acids of CD3 epsilon of the designated species fused to cynomolgus EpCAM. The FACS staining is performed as described in Example 19.3. The bold lines represent cells incubated with 50 μl cell culture supernatant of cells expressing the I2C IgG1 construct. The filled histograms reflect the negative control. Cells expressing the 1-27 N-terminal amino acids of CD3 epsilon of swine fused to cynomolgus EpCAM were used as negative control. In comparison with the negative control the histograms clearly demonstrate binding of the I2C IgG1 construct to 1-27 N-terminal amino acids of CD3 epsilon of human, marmoset, tamarin and squirrel monkey.

[0303] FIG. 38

[0304] FACS binding analysis of the I2C IgG1 construct as described in Example 19.2 to human CD3 with and without N-terminal His6 tag as described in Examples 6.1 and 5.1 respectively. The bold lines represent cells incubated with the anti-human CD3 antibody UCHT-1, the penta-His antibody (Qiagen) and cell culture supernatant of cells expressing the I2C IgG1 construct respectively as indicated. The filled histograms reflect cells incubated with an irrelevant murine IgG1 antibody as negative control.

[0305] The upper two histogram overlays show comparable binding of the UCHT-1 antibody to both transfectants as compared to the isotype control demonstrating expression of both recombinant constructs. The centre histogram overlays show binding of the penta his antibody to the cells expressing the His6-human CD3 epsilon chain (His6-CD3) but not to the cells expressing the wild-type CD3 epsilon chain (WT-CD3). The lower Histogram overlays show binding of the I2C IgG1 construct to the wild-type human CD3 epsilon chain but not to the His6-human CD3 epsilon chain. These results demonstrate that a free N-terminus is essential for binding of the cross-species specific anti-CD3 binding molecule I2C to the CD3 epsilon chain.

[0306] FIG. 39

[0307] FACS binding analysis of designated cross-species specific bispecific single chain constructs to CHO cells transfected with human MCSP D3, the human CD3+ T cell line HPB-ALL, CHO cells transfected with macaque MCSP D3 and the macaque T cell line 4119 LnPx respectively. The FACS staining was performed as described in Example 10. The bold lines represents cells incubated with 2 μg/ml purified bispecific single chain construct or cell supernatant containing the bispecific single chain construct respectively. The filled histograms reflect the negative controls. Supernatant of untransfected CHO cells was used as negative control for binding to the T cell lines. A single chain construct with irrelevant target specificity was used as negative control for binding to the MCSP D3 transfected CHO cells. For each cross-species specific bispecific single chain construct the overlay of the histograms shows specific binding of the construct to human and macaque MCSP D3 and human and macaque CD3.

[0308] FIG. 40

[0309] Cytotoxic activity induced by designated cross-species specific MCSP D3 specific single chain constructs redirected to the indicated target cell lines. Effector cells and effector to target ratio were also used as indicated. The assay is performed as described in Example 11. The diagrams clearly demonstrate potent cross-species specific recruitment of cytotoxic activity by each construct.

[0310] FIG. 41

[0311] FACS binding analysis of designated cross-species specific bispecific single chain constructs to CHO cells transfected with human CD33, the human CD3+ T cell line HPB-ALL, CHO cells transfected with macaque CD33 and macaque PBMC respectively. The FACS staining was performed as described in Example 21.2. The bold lines represent cells incubated with cell culture supernatant of transfected cells expressing the cross-species specific bispecific antibody constructs. The filled histograms reflect the negative controls. Supernatant of untransfected CHO cells was used as negative control. For each cross-species specific bispecific single chain construct the overlay of the histograms shows specific binding of the construct to human and macaque CD33 and human and macaque CD3.

[0312] FIG. 42

[0313] The diagrams show results of chromium release assays measuring cytotoxic activity induced by designated cross-species specific CD33 specific single chain constructs redirected to the indicated target cell lines. Effector cells were also used as indicated. The assays are performed as described in Example 21.3. The diagrams clearly demonstrate for each construct the potent recruitment of cytotoxic activity of human and macaque effector cells against human and macaque CD33 transfected CHO cells, respectively.

[0314] FIG. 43

[0315] T cell redistribution in a chimpanzee under weekly intravenous bolus infusion with PBS/5% HSA and PBS/5% HSA plus single-chain EpCAM/CD3-bispecific antibody construct at doses of 1.6, 2.0, 3.0 and 4.5 μg/kg. The infusion time for each bolus administration was 2 hours. Vertical arrows indicate the start of bolus infusions. Data points at the beginning of each bolus administration show the T cell counts immediately prior to start of bolus infusion. Each bolus infusion of the single-chain EpCAM/CD3-bispecific antibody construct, which recognizes a conventional context dependent CD3 epitope, triggered an episode of T cell redistribution followed by recovery of T cells to baseline values prior to the next bolus infusion.

[0316] FIG. 44

[0317] CD3 specific ELISA analysis of periplasmic preparations containing Flag tagged scFv protein fragments from selected clones. Periplasmic preparations of soluble scFv protein fragments were added to wells of an ELISA plate, which had been coated with soluble human CD3 epsilon (aa 1-27)-Fc fusion protein and had been additionally blocked with PBS 3% BSA. Detection was performed by a monoclonal anti Flag-Biotin-labeled antibody followed by peroxidase-conjugated Streptavidin. The ELISA was developed by an ABTS substrate solution. The OD values (y axis) were measured at 405 nm by an ELISA reader. Clone names are presented on the x axis.

[0318] FIG. 45

[0319] ELISA analysis of periplasmic preparations containing Flag tagged scFv protein fragments from selected clones. The same periplasmic preparations of soluble scFv protein fragments as in FIG. 44 were added to wells of an ELISA plate which had not been coated with human CD3 epsilon (aa 1-27)-Fc fusion protein but with huIgG1 (Sigma) and blocked with 3% BSA in PBS.

[0320] Detection was performed by a monoclonal anti Flag-Biotin-labeled antibody followed by peroxidase-conjugated Streptavidin. The ELISA was developed by an ABTS substrate solution. The OD values (y axis) were measured at 405 nm by an ELISA reader. Clone names are presented on the x axis.

[0321] FIG. 46/1

[0322] FACS binding analysis of designated cross-species specific single domain bispecific single chain constructs to CHO cells transfected with human EGFR, human CD3+ T cell line HPB-ALL, CHO cells transfected with macaque EGFR and a macaque T cell line 4119 LnPx. The FACS staining was performed as described in Example 24.5. The thick line represents cells incubated with cell culture supernatant containing the construct to be tested that were subsequently incubated with the anti-His antibody and the PE labeled detection antibody. The thin histogram line reflects the negative control: cells only incubated with the anti-his antibody and the detection antibody.

[0323] FIG. 46/2

[0324] FACS binding analysis of designated cross-species specific single domain bispecific single chain constructs to CHO cells transfected with the human EGFR, human CD3+ T cell line HPB-ALL, CHO cells transfected with macaque EGFR and a macaque T cell line 4119 LnPx. The FACS staining was performed as described in Example 24. 5. The thick line represents cells incubated with cell culture supernatant containing the construct to be tested that were subsequently incubated with the anti-His antibody and the PE labeled detection antibody. The thin histogram line reflects the negative control: cells only incubated with the anti-his antibody and the detection antibody.

[0325] FIG. 47/1

[0326] Cytotoxic activity induced by designated cross-species specific single domain bispecific single chain constructs redirected to indicated target cell lines. A) Stimulated CD4-/CD56-human PBMCs were used as effector cells, CHO cells transfected with human EGFR as target cells. B) The macaque T cell line 4119 LnPx was used as source of effector cells, CHO cells transfected with macaque EGFR were used as target cells. The assay was performed as described in Example 24.6.

[0327] FIG. 47/2

[0328] Cytotoxic activity induced by designated cross-species specific single domain bispecific single chain constructs redirected to indicated target cell lines. A) Stimulated CD4-/CD56-human PBMCs were used as effector cells, CHO cells transfected with human EGFR as target cells. B) The macaque T cell line 4119 LnPx was used as source of effector cells, CHO cells transfected with macaque EGFR as target cells. The assay was performed as described in Example 24.6.

[0329] FIG. 48

[0330] 52 days after the first immunization antibody serum titers against the CD3-positive human T cell line HPBaII and the macaque CD3-positive T cell line 4119LnPx were tested in flow cytometry according to standard protocols. To this end 200.000 cells of the respective cell lines were incubated for 30 min on ice with 50 μl of serum of the immunized animals diluted 1:1000 in PBS with 2% FCS. The cells were washed twice in PBS with 2% FCS and binding of serum antibodies was detected with a FITC conjugated Goat anti-Llama IgG-H&L Antibody diluted 1:100 in 50 μl PBS with 2% FCS. Serum of the animals obtained prior to immunization was used as a negative control (filled curve). Flow cytometry was performed and analyzed. Reactivity to the CD3-positive human T cell line HPBaII and the CD3-positive macaque T cell line 4119LnPx of a serum sample of one exemplary animal obtained 52 days after the first immunization was clearly detectable (bold lines).

[0331] FIG. 49

[0332] Binding of crude preparations of periplasmatically expressed anti-CD3 single domain antibody CD3 3D-H11 to human and non-chimpanzee primate CD3 was tested by flowcytometry on the CD3 positive human T cell leukemia cell line HPB-ALL and the CD3 positive macaque T cell line 4119LnPx. For flow cytometry 2.5×10⁵ cells were incubated with 50 ul periplasmic supernatant. The binding of the constructs was detected with an anti-His antibody followed by PE conjugated goat anti-mouse IgG. The samples were measured on a FACSscan. The filled curves represent the negative controls; the thick lines represent CD3 3D-H11. The overlays of the histograms show cross-species specific binding of anti-CD3 single domain binder CD3 3D-H11 to human and macaque T cells and no binding to CD3 negative CHO cells.

[0333] FIG. 50

[0334] Binding of crude preparations of periplasmatically expressed anti-CD3 single domain antibody CD3 3D-H11 to immobilized human 1-27 CD3-Fc fusion protein and human 1-27 CD3 BSA conjugate was tested in an ELISA assay. Antigen was immobilized over night and the subsequently blocked wells were then were incubated with crude preparations of periplasmatically expressed single domain antibody at room temperature. After washing with PBS/Tween wells were incubated with peroxidase conjugated anti-Flag M2 antibody and after washing incubated withl of the SIGMAFAST OPD (OPD [o-Phenylenediamine dihydrochloride] substrate solution (Sigma-Aldrich Chemie GmbH, Taufkirchen, Germany) according to the manufacturers protocol. Color reaction was stopped and the plate measured on a PowerWaveX microplate spectrophotometer at 490 nm and subtraction of background absorption at 620 nm. Binding of detection antibody alone was substracted. Binding of anti-CD3 single domain antibody CD3 3D-H11 to 1-27 CD3-Fc fusion protein as well as to 1-27 CD3 BSA conjugate could clearly be detected, whereas the signal on the blocking agent alone was negligible.

[0335] The present invention is additionally described by way of the following illustrative non-limiting examples that provide a better understanding of the present invention and of its many advantages.

### EXAMPLES

### 1. Identification of CD3Epsilon Sequences from Blood Samples of Non-Human Primates

[0336] Blood samples of the following non-human primates were used for CD3epsilon-identification: Callithrix jacchus, Saguinus oedipus and Saimiris ciureus. Fresh heparin-treated whole blood samples were prepared for isolating total cellular RNA according to manufacturer's protocol (QIAamp RNA Blood Mini Kit, Qiagen). The extracted mRNA was transcribed into cDNA according to published protocols. In brief, 10 μl of precipitated RNA was incubated with 1.2 μl of 10× hexanucleotide mix (Roche) at 70° C. for 10 minutes and stored on ice. A reaction mix consisting of 4 μl of 5× superscript II buffer, 0.2 μl of 0.1M dithiothreitole, 0.8 μl of superscript II (Invitrogen), 1.2 μl of desoxyribonucleoside triphosphates (25 μM), 0.8 μl of RNase Inhibitor (Roche) and 1.8 μl of DNase and RNase free water (Roth) was added. The reaction mix was incubated at room temperature for 10 minutes followed by incubation at 42° C. for 50 minutes and at 90° C. for 5 minutes. The reaction was cooled on ice before adding 0.8 μl of RNaseH (1 U/μl, Roche) and incubated for 20 minutes at 37° C.

[0337] The first-strand cDNAs from each species were subjected to separate 35-cycle polymerase chain reactions using Taq DNA polymerase (Sigma) and the following primer combination designed on database research: forward primer 5′-AGAGTTCTGGGCCTCTGC-3′ (SEQ ID NO: 253); reverse primer 5′-CGGATGGGCTCATAGTCTG-3′ (SEQ ID NO: 254). The amplified 550 bp-bands were gel purified (Gel Extraction Kit, Qiagen) and sequenced (Sequiserve, Vaterstetten/Germany, see sequence listing).

CD3epsilon Callithrix jacchus
Nucleotides
CAGGACGGTAATGAAGAAATGGGTGATACTACACAGAACCCATATAAA
GTTTCCATCTCAGGAACCACAGTAACACTGACATGCCCTCGGTATGAT
GGACATGAAATAAAATGGCTCGTAAATAGTCAAAACAAAGAAGGTCAT
GAGGACCACCTGTTACTGGAGGACTTTTCGGAAATGGAGCAAAGTGGT
TATTATGCCTGCCTCTCCAAAGAGACTCCCGCAGAAGAGGCGAGCCA
TTATCTCTACCTGAAGGCAAGAGTGTGTGAGAACTGCGTGGAGGTG
GAT
Amino acids

(SEQ ID NO: 3)

QDGNEEMGDTTQNPYKVSISGTTVTLTCPRYDGHEIKWLVNSQNKEGHE
DHLLLEDFSEMEQSGYYACLSKETPAEEASHYLYLKARVCENCVEVD
CD3epsilon Saguinus oedipus
Nucleotides
CAGGACGGTAATGAAGAAATGGGTGATACTACACAGAACCCATATAA
AGTTTCCATCTCAGGAACCACAGTAACACTGACATGCCCTCGGTATG
ATGGACATGAAATAAAATGGCTTGTAAATAGTCAAAACAAAGAAGGTC
ATGAGGACCACCTGTTACTGGAGGATTTTTCGGAAATGGAGCAAAGTG
GTTATTATGCCTGCCTCTCCAAAGAGACTCCCGCAGAAGAGGCGAG
CCATTATCTCTACCTGAAGGCAAGAGTGTGTGAGAACTGCGTGGAG
GTGGAT
Amino acids

(SEQ ID NO: 5)

QDGNEEMGDTTQNPYKVSISGTTVTLTCPRYDGHEIKWLVNSQNKEGHE
DHLLLEDFSEMEQSGYYACLSKETPAEEASHYLYLKARVCENCVEVD
CD3epsilon Saimiris ciureus
Nucleotides
CAGGACGGTAATGAAGAGATTGGTGATACTACCCAGAACCCATATAAA
GTTTCCATCTCAGGAACCACAGTAACACTGACATGCCCTCGGTATGAT
GGACAGGAAATAAAATGGCTCGTAAATGATCAAAACAAAGAAGGTCAT
GAGGACCACCTGTTACTGGAAGATTTTTCAGAAATGGAACAAAGTGGT
TATTATGCCTGCCTCTCCAAAGAGACCCCCACAGAAGAGGCGAGCC
ATTATCTCTACCTGAAGGCAAGAGTGTGTGAGAACTGCGTGGAGG
TGGAT
Amino acids

(SEQ ID NO: 7)

QDGNEEIGDTTQNPYKVSISGTTVTLTCPRYDGQEIKWLVNDQNKEGHED
HLLLEDFSEMEQSGYYACLSKETPTEEASHYLYLKARVCENCVEVD

### 2. Generation of Cross-Species Specific Single Chain Antibody Fragments (scFv) Binding to the N-Terminal Amino Acids 1-27 of CD3Epsilon of Man and Different Non-Chimpanzee Primates

[0338] 2.1. Immunization of Mice Using the N-Terminus of CD3Epsilon Separated from its Native CD3-Context by Fusion to a Heterologous Soluble Protein

[0339] Ten weeks old F1 mice from balb/c×C57black crossings were immunized with the CD3epsilon-Fc fusion protein carrying themost N-terminal amino acids 1-27 of the mature CD3epsilon chain (1-27 CD3-Fc) of man and/or saimiris ciureus. To this end 40 μg of the 1-27 CD3-Fc fusion protein with 10 nmol of a thioate-modified CpG-Oligonucleotide (5′-tccatgacgttcctgatgct-3′) (SEQ ID No. 343) in 300 ul PBS were injected per mouse intra-peritoneally. Mice receive booster immunizations after 21, 42 and optionally 63 days in the same way. Ten days after the first booster immunization, blood samples were taken and antibody serum titer against 1-27 CD3-Fc fusion protein iwa tested by ELISA. Additionally, the titer against the CD3-positive human T cell line HPBall was tested in flow cytometry according to standard protocols. Serum titers were significantly higher in immunized than in non-immunized animals.

2.2. Generation of an Immune Murine Antibody scFv Library: Construction of a Combinatorial Antibody Library and Phage Display

[0340] Three days after the last injection the murine spleen cells were harvested for the preparation of total RNA according to standard protocols.

[0341] A library of murine immunoglobuline (Ig) light chain (kappa) variable region (VK) and Ig heavy chain variable region (VH) DNA-fragments was constructed by RT-PCR on murine spleen RNA using VK- and VH specific primer. cDNA was synthesized according to standard protocols.

[0342] The primers were designed in a way to give rise to a 5′-XhoI and a 3′-BstEII recognition site for the amplified heavy chain V-fragments and to a 5′-SacI and a 3′-SpeI recognition site for amplified VK DNA fragments.

[0343] For the PCR-amplification of the VH DNA-fragments eight different 5′-VH-family specific primers (MVH1(GC)AG GTG CAG CTC GAG GAG TCA GGA CCT (SEQ ID No. 344); MVH2 GAG GTC CAG CTC GAG CAG TCT GGA CCT (SEQ ID No. 345); MVH3 CAG GTC CAA CTC GAG CAG CCT GGG GCT (SEQ ID No. 346); MVH4 GAG GTT CAG CTC GAG CAG TCT GGG GCA (SEQ ID No. 347); MVH5 GA(AG) GTG AAG CTC GAG GAG TCT GGA GGA (SEQ ID No. 348); MVH6 GAG GTG AAG CTT CTC GAG TCT GGA GGT (SEQ ID No. 349); MVH7 GAA GTG AAG CTC GAG GAG TCT GGG GGA (SEQ ID No. 350); MVH8 GAG GTT CAG CTC GAG CAG TCT GGA GCT (SEQ ID No. 351)) were each combined with one 3′-VH primer (3′MuVHBstEII tga gga gac ggt gac cgt ggt ccc ttg gcc cca g (SEQ ID No. 352)); for the PCR amplification of the VK-chain fragments seven different 5′-VK-family specific primers (MUVK1 CCA GTT CCG AGC TCG TTG TGA CTC AGG AAT CT (SEQ ID No. 353); MUVK2 CCA GTT CCG AGC TCG TGT TGA CGC AGC CGC CC (SEQ ID No. 354); MUVK3 CCA GTT CCG AGC TCG TGC TCA CCC AGT CTC CA (SEQ ID No. 355); MUVK4 CCA GTT CCG AGC TCC AGA TGA CCC AGT CTC CA (SEQ ID No. 356); MUVK5 CCA GAT GTG AGC TCG TGA TGA CCC AGA CTC CA (SEQ ID No. 357); MUVK6 CCA GAT GTG AGC TCG TCA TGA CCC AGT CTC CA (SEQ ID No. 358); MUVK7 CCA GTT CCG AGC TCG TGA TGA CAC AGT CTC CA (SEQ ID No. 359)) were each combined with one 3′-VK primer (3′MuVkHindIII/BsiW1 tgg tgc act agt cgt acg ttt gat ctc aag ctt ggt ccc (SEQ ID No. 360)).

[0344] The following PCR program was used for amplification: denaturation at 94° C. for 20 sec; primer annealing at 52° C. for 50 sec and primer extension at 72° C. for 60 sec and 40 cycles, followed by a 10 min final extension at 72° C.

[0345] 450 ng of the kappa light chain fragments (SacI-SpeI digested) were ligated with 1400 ng of the phagemid pComb3H5Bhis (SacI-SpeI digested; large fragment). The resulting combinatorial antibody library was then transformed into 300 ul of electrocompetent Escherichia coli XL1 Blue cells by electroporation (2.5 kV, 0.2 cm gap cuvette, 25 uFD, 200 Ohm, Biorad gene-pulser) resulting in a library size of more than 10⁷ independent clones. After one hour of phenotype expression, positive transformants were selected for carbenicilline resistance encoded by the pComb3H5BHis vector in 100 ml of liquid super broth (SB)-culture over night. Cells were then harvested by centrifugation and plasmid preparation was carried out using a commercially available plasmid preparation kit (Qiagen).

[0346] 2800 ng of this plasmid-DNA containing the VK-library (XhoI-BstEII digested; large fragment) were ligated with 900 ng of the heavy chain V-fragments (XhoI-BstEII digested) and again transformed into two 300 ul aliquots of electrocompetent E. coli XL1 Blue cells by electroporation (2.5 kV, 0.2 cm gap cuvette, 25 uFD, 200 Ohm) resulting in a total VH-VK scFv (single chain variable fragment) library size of more than 10⁷ independent clones.

[0347] After phenotype expression and slow adaptation to carbenicillin, the E. coli cells containing the antibody library were transferred into SB-Carbenicillin (50 ug/mL) selection medium. The E. coli cells containing the antibody library wass then infected with an infectious dose of 10¹² particles of helper phage VCSM13 resulting in the production and secretion of filamentous M13 phage, wherein phage particle contains single stranded pComb3H5BHis-DNA encoding a murine scFv-fragment and displayed the corresponding scFv-protein as a translational fusion to phage coat protein III. This pool of phages displaying the antibody library was later used for the selection of antigen binding entities.

### 2.3. Phage Display Based Selection of CD3-Specific Binders

[0348] The phage library carrying the cloned scFv-repertoire was harvested from the respective culture supernatant by PEG8000/NaCl precipitation and centrifugation. Approximately 10¹¹ to 10¹² scFv phage particles were resuspended in 0.4 ml of PBS/0.1% BSA and incubated with 10⁵ to 10⁷ Jurkat cells (a CD3-positive human T-cell line) for 1 hour on ice under slow agitation. These Jurkat cells were grown beforehand in RPMI medium enriched with fetal calf serum (10%), glutamine and penicillin/streptomycin, harvested by centrifugation, washed in PBS and resuspended in PBS/1% FCS (containing Na Azide). scFv phage which do not specifically bind to the Jurkat cells were eliminated by up to five washing steps with PBS/1% FCS (containing Na Azide). After washing, binding entities were eluted from the cells by resuspending the cells in HCl-glycine pH 2.2 (10 min incubation with subsequent vortexing) and after neutralization with 2 M Tris pH 12, the eluate was used for infection of a fresh uninfected E. coli XL1 Blue culture (OD600>0.5). The E. coli culture containing E. coli cells successfully transduced with a phagemid copy, encoding a human scFv-fragment, were again selected for carbenicillin resistance and subsequently infected with VCMS13 helper phage to start the second round of antibody display and in vitro selection. A total of 4 to 5 rounds of selections were carried out, normally.

### 2.4. Screening for CD3-Specific Binders

[0349] Plasmid DNA corresponding to 4 and 5 rounds of panning was isolated from E. coli cultures after selection. For the production of soluble scFv-protein, VH-VL-DNA fragments were excised from the plasmids (XhoI-SpeI). These fragments were cloned via the same restriction sites in the plasmid pComb3H5BFlag/His differing from the original pComb3H5BHis in that the expression construct (e.g. scFv) includes a Flag-tag (TGD YKDDDDK) between the scFv and the His6-tag and the additional phage proteins were deleted. After ligation, each pool (different rounds of panning) of plasmid DNA was transformed into 100 μl heat shock competent E. coli TG1 or XLI blue and plated onto carbenicillin LB-agar. Single colonies were picked into 100 ul of LB carb (50 ug/ml).

[0350] E. coli transformed with pComb3H5BHis containing a VL- and VH-segment produce soluble scFv in sufficient amounts after excision of the gene III fragment and induction with 1 mM IPTG. Due to a suitable signal sequence, the scFv-chain was exported into the periplasma where it folds into a functional conformation.

[0351] Single E. coli TG1 bacterial colonies from the transformation plates were picked for periplasmic small scale preparations and grown in SB-medium (e.g. 10 ml) supplemented with 20 mM MgCl2 and carbenicillin 50 μg/ml (and re-dissolved in PBS (e.g. 1 ml) after harvesting. By four rounds of freezing at −70° C. and thawing at 37° C., the outer membrane of the bacteria was destroyed by temperature shock and the soluble periplasmic proteins including the scFvs were released into the supernatant. After elimination of intact cells and cell-debris by centrifugation, the supernatant containing the human anti-human CD3-scFvs was collected and used for further examination.

### 2.5. Identification of CD3-Specific Binders

[0352] Binding of the isolated scFvs was tested by flow cytometry on eukaryotic cells, which on their surface express a heterologous protein displaying at its N-terminus the first 27 N-terminal amino acids of CD3epsilon.

[0353] As described in Example 4, the first amino acids 1-27 of the N-terminal sequence of the mature CD3 epsilon chain of the human T cell receptor complex (amino acid sequence: QDGNEEMGGITQTPYKVSISGTTVILT SEQ ID NO: 2) were fused to the N-terminus of the transmembrane protein EpCAM so that the N-terminus was located at the outer cell surface. Additionally, a FLAG epitope was inserted between the N-terminal 1-27 CD3epsilon sequence and the EpCAM sequence. This fusion product was expressed in human embryonic kidney (HEK) and chinese hamster ovary (CHO) cells.

[0354] Eukaryotic cells displaying the 27 most N-terminal amino acids of mature CD3epsilon of other primate species were prepared in the same way for Saimiri ciureus (Squirrel monkey) (CD3 epsilon N-terminal amino acid sequence: QDGNEEIGDTTQNPYKVSISGTTVTLT SEQ ID NO: 8), for Callithrix jacchus (CD3 epsilon N-terminal amino acid sequence: QDGNEEMGDTTQNPYKVSISGTTVTLT SEQ ID NO: 4) and for Saguinus oedipus (CD3 epsilon N-terminal amino acid sequence: QDGNEEMGDTTQNPYKVSISGTTVTLT SEQ ID NO: 6).

[0355] For flow cytometry 2.5×10⁵ cells are incubated with 50 ul supernatant or with 5 μg/ml of the purified constructs in 50 μl PBS with 2% FCS. The binding of the constructs was detected with an anti-His antibody (Penta-His Antibody, BSA free, Qiagen GmbH, Hilden, FRG) at 2 μg/ml in 50 μl PBS with 2% FCS. As a second step reagent a R-Phycoerythrin-conjugated affinity purified F(ab′)2 fragment, goat anti-mouse IgG (Fc-gamma fragment specific), diluted 1:100 in 50 μl PBS with 2% FCS (Dianova, Hamburg, FRG) was used. The samples were measured on a FACSscan (BD biosciences, Heidelberg, FRG).

[0356] Binding was always confirmed by flowcytometry as described in the foregoing paragraph on primary T cells of man and different primates (e.g. saimiris ciureus, callithrix jacchus, saguinus oedipus).

2.6. Generation of Human/Humanized Equivalents of Non-Human CD3Epsilon Specific scFvs

[0357] The VH region of the murine anti-CD3 scFv was aligned against human antibody germline amino acid sequences. The human antibody germline VH sequence was chosen which has the closest homology to the non-human VH and a direct alignment of the two amino acid sequences was performed. There were a number of framework residues of the non-human VH that differ from the human VH framework regions (“different framework positions”). Some of these residues may contribute to the binding and activity of the antibody to its target.

[0358] To construct a library that contain the murine CDRs and at every framework position that differs from the chosen human VH sequence both possibilities (the human and the maternal murine amino acid residue), degenerated oligonucleotides were synthesized. These oligonucleotides incorporate at the differing positions the human residue with a probability of 75% and the murine residue with a probability of 25%. For one human VH e.g. six of these oligonucleotides had to be synthesized that overlap in a terminal stretch of approximately 20 nucleotides. To this end every second primer was an antisense primer. Restriction sites needed for later cloning within the oligonucleotides were deleted.

[0359] These primers may have a length of 60 to 90 nucleotides, depending on the number of primers that were needed to span over the whole V sequence.

[0360] These e.g. six primers were mixed in equal amounts (e.g. 1 μl of each primer (primer stocks 20 to 100 μM) to a 20 μl PCR reaction) and added to a PCR mix consisting of PCR buffer, nucleotides and Taq polymerase. This mix was incubated at 94° C. for 3 minutes, 65° C. for 1 minute, 62° C. for 1 minute, 59° C. for 1 minute, 56° C. for 1 minute, 52° C. for 1 minute, 50° C. for 1 minute and at 72° C. for 10 minutes in a PCR cycler. Subsequently the product was run in an agarose gel electrophoresis and the product of a size from 200 to 400 isolated from the gel according to standard methods.

[0361] This PCR product was then used as a template for a standard PCR reaction using primers that incorporate N-terminal and C-terminal suitable cloning restriction sites. The DNA fragment of the correct size (for a VH approximately 350 nucleotides) was isolated by agarose gel electrophoresis according to standard methods. In this way sufficient VH DNA fragment was amplified. This VH fragment was now a pool of VH fragments that have each one a different amount of human and murine residues at the respective differing framework positions (pool of humanized VH). The same procedure was performed for the VL region of the murine anti-CD3 scFv (pool of humanized VL).

[0362] The pool of humanized VH was then combined with the pool of humanized VL in the phage display vector pComb3H5Bhis to form a library of functional scFvs from which—after display on filamentous phage—anti-CD3 binders were selected, screened, identified and confirmed as described above for the parental non-human (murine) anti-CD3 scFv. Single clones were then analyzed for favorable properties and amino acid sequence. Those scFvs which were closest in amino acid sequence homology to human germline V-segments are preferred particularly those wherein at least one CDR among CDR I and II of VH and CDR I and II of VLkappa or CDR I and II of VLlambda shows more than 80% amino acid sequence identity to the closest respective CDR of all human germline V-segments. Anti-CD3 scFvs were converted into recombinant bispecific single chain antibodies as described in the following Examples 9, 16, and 24.

### 3. Generation of a Recombinant Fusion Protein of the N-Terminal Amino Acids 1-27 of the Human CD3 Epsilon Chain Fused to the Fc-Part of an IgG1 (1-27 CD3-Fc)

### 3.1. Cloning and Expression of 1-27 CD3-Fc

[0363] The coding sequence of the 1-27 N-terminal amino acids of the human CD3 epsilon chain fused to the hinge and Fc gamma region of human immunoglobulin IgG1 as well as an 6 Histidine Tag were obtained by gene synthesis according to standard protocols (cDNA sequence and amino acid sequence of the recombinant fusion protein are listed under SEQ ID NOs 230 and 229). The gene synthesis fragment was designed as to contain first a Kozak site for eukaryotic expression of the construct, followed by an 19 amino acid immunoglobulin leader peptide, followed in frame by the coding sequence of the first 27 amino acids of the extracellular portion of the mature human CD3 epsilon chain, followed in frame by the coding sequence of the hinge region and Fc gamma portion of human IgG1, followed in frame by the coding sequence of a 6 Histidine tag and a stop codon (FIG. 1). The gene synthesis fragment was also designed as to introduce restriction sites at the beginning and at the end of the cDNA coding for the fusion protein. The introduced restriction sites, EcoRI at the 5′ end and SalI at the 3′ end, are utilized in the following cloning procedures. The gene synthesis fragment was cloned via EcoRI and SalI into a plasmid designated pEF-DHFR (pEF-DHFR is described in Mack et al. Proc. Natl. Acad. Sci. USA 92 (1995) 7021-7025) following standard protocols. A sequence verified plasmid was used for transfection in the FreeStyle 293 Expression System (Invitrogen GmbH, Karlsruhe, Germany) according to the manufacturers protocol. After 3 days cell culture supernatants of the transfectants were harvested and tested for the presence of the recombinant construct in an ELISA assay. Goat anti-human IgG, Fc-gamma fragment specific antibody (obtained from Jackson ImmunoResearch Europe Ltd., Newmarket, Suffolk, UK) was diluted in PBS to 5 μg/ml and coated with 100 μl per well onto a MaxiSorp 96-well ELISA plate (Nunc GmbH & Co. KG, Wiesbaden, Germany) over night at 4° C. Wells were washed with PBS with 0.05% Tween 20 (PBS/Tween and blocked with 3% BSA in PBS (bovine Albumin, fraction V, Sigma-Aldrich Chemie GmbH, Taufkirchen, Germany) for 60 minutes at room temperature (RT). Subsequently, wells were washed again PBS/Tween and then incubated with cell culture supernatants for 60 minutes at RT. After washing wells were incubated with a peroxidase conjugated anti-His6 antibody (Roche Diagnostics GmbH, Roche Applied Science, Mannheim, Germany) diluted 1:500 in PBS with 1% BSA for 60 minutes at RT. Subsequently, wells were washed with 200 μl PBS/Tween and 100 μl of the SIGMAFAST OPD (SIGMAFAST OPD [o-Phenylenediamine dihydrochloride] substrate solution (Sigma-Aldrich Chemie GmbH, Taufkirchen, Germany) was added according to the manufacturers protocol. The reaction was stopped by adding 100 μl 1 M H₂SO₄. Color reaction was measured on a PowerWaveX microplate spectrophotometer (BioTek Instruments, Inc., Winooski, Vt., USA) at 490 nm and subtraction of background absorption at 620 nm. As shown in FIG. 2 presence of the construct as compared to irrelevant supernatant of mock-transfected HEK 293 cells used as negative control was clearly detectable.

### 3.2. Binding Assay of Cross-Species Specific Single Chain Antibodies to 1-27 CD3-Fc.

[0364] Binding of crude preparations of periplasmatically expressed cross-species specific single chain antibodies specific for CD3 epsilon to 1-27 CD3-Fc was tested in an ELISA assay. Goat anti-human IgG, Fc-gamma fragment specific antibody (Jackson ImmunoResearch Europe Ltd., Newmarket, Suffolk, UK) was diluted in PBS to 5 μg/ml and coated with 100 μl per well onto a MaxiSorp 96-well ELISA plate (Nunc GmbH & Co. KG, Wiesbaden, Germany) over night at 4° C. Wells were washed with PBS with 0.05% Tween 20 (PBS/Tween and blocked with PBS with 3% BSA (bovine Albumin, fraction V, Sigma-Aldrich Chemie GmbH, Taufkirchen, Germany) for 60 minutes at RT. Subsequently, wells were washed with PBS/Tween and incubated with supernatants of cells expressing the 1-27 CD3-Fc construct for 60 minutes at RT. Wells were washed with PBS/Tween and incubated with crude preparations of periplasmatically expressed cross-species specific single-chain antibodies as described above for 60 minutes at room temperature. After washing with PBS/Tween wells were incubated with peroxidase conjugated anti-Flag M2 antibody (Sigma-Aldrich Chemie GmbH, Taufkirchen, Germany) diluted 1:10000 in PBS with 1% BSA for 60 minutes at RT. Wells were washed with PBS/Tween and incubated with 100 μl of the SIGMAFAST OPD (OPD [o-Phenylenediamine dihydrochloride] substrate solution (Sigma-Aldrich Chemie GmbH, Taufkirchen, Germany) according to the manufacturers protocol. Color reaction was stopped with 100 μl 1 M H₂SO₄ and measured on a PowerWaveX microplate spectrophotometer (BioTek Instruments, Inc., Winooski, Vt., USA) at 490 nm and subtraction of background absorption at 620 nm. Strong binding of cross-species specific human single chain antibodies specific for CD3 epsilon to the 1-27 CD3-Fc construct compared to a murine anti CD3 single-chain antibody was observed (FIG. 3).

### 4. Generation of Recombinant Transmembrane Fusion Proteins of the N-Terminal Amino Acids 1-27 of CD3 Epsilon from Different Non-Chimpanzee Primates Fused to EpCAM from Cynomolgus Monkey (1-27 CD3-EpCAM)

### 4.1. Cloning and Expression of 1-27 CD3-EpCAM

[0365] CD3 epsilon was isolated from different non-chimpanzee primates (marmoset, tamarin, squirrel monkey) and swine. The coding sequences of the 1-27 N-terminal amino acids of CD3 epsilon chain of the mature human, common marmoset (Callithrix jacchus), cottontop tamarin (Saguinus oedipus), common squirrel monkey (Saimiri sciureus) and domestic swine (Sus scrofa; used as negative control) fused to the N-terminus of Flag tagged cynomolgus EpCAM were obtained by gene synthesis according to standard protocols. cDNA sequence and amino acid sequence of the recombinant fusion proteins are listed under SEQ ID NOs 231 to 240). The gene synthesis fragments were designed as to contain first a BsrGl site to allow fusion in correct reading frame with the coding sequence of a 19 amino acid immunoglobulin leader peptide already present in the target expression vector, which is followed in frame by the coding sequence of the N-terminal 1-27 amino acids of the extracellular portion of the mature CD3 epsilon chains, which is followed in frame by the coding sequence of a Flag tag and followed in frame by the coding sequence of the mature cynomolgus EpCAM transmembrane protein (FIG. 4). The gene synthesis fragments were also designed to introduce a restriction site at the end of the cDNA coding for the fusion protein. The introduced restriction sites BsrGI at the 5′ end and SalI at the 3′ end, were utilized in the following cloning procedures. The gene synthesis fragments were then cloned via BsrGI and SalI into a derivative of the plasmid designated pEF DHFR (pEF-DHFR is described in Mack et al. Proc. Natl. Acad. Sci. USA 92 (1995) 7021-7025), which already contained the coding sequence of the 19 amino acid immunoglobulin leader peptide following standard protocols. Sequence verified plasmids were used to transiently transfect 293-HEK cells using the MATra-A Reagent (IBA GmbH, Gottingen, Germany) and 12 μg of plasmid DNA for adherent 293-HEK cells in 175 ml cell culture flasks according to the manufacturers protocol. After 3 days of cell culture the transfectants were tested for cell surface expression of the recombinant transmembrane protein via an FACS assay according to standard protocols. For that purpose a number of 2.5×10⁵ cells were incubated with the anti-Flag M2 antibody (Sigma-Aldrich Chemie GmbH, Taufkirchen, Germany) at 5 μg/ml in PBS with 2% FCS. Bound antibody was detected with an R-Phycoerythrin-conjugated affinity purified F(ab′)2 fragment, goat anti-mouse IgG, Fc-gamma fragment specific 1:100 in PBS with 2% FCS (Jackson ImmunoResearch Europe Ltd., Newmarket, Suffolk, UK). The samples were measured on a FACScalibur (BD biosciences, Heidelberg, Germany). Expression of the Flag tagged recombinant transmembrane fusion proteins consisting of cynomolgus EpCAM and the 1-27 N-terminal amino acids of the human, marmoset, tamarin, squirrel monkey and swine CD3 epsilon chain respectively on transfected cells was clearly detectable (FIG. 5).

### 4.2. Binding of Cross-Species Specific Anti-CD3 Single Chain Antibodies to the 1-27 CD3-EpCAM

[0366] Binding of crude preparations of periplasmatically expressed cross-species specific anti CD3 single-chain antibodies to the 1-27 N-terminal amino acids of the human, marmoset, tamarin and squirrel monkey CD3 epsilon chains respectively fused to cynomolgus Ep-CAM was tested in an FACS assay according to standard protocols. For that purpose a number of 2.5×10⁵ cells were incubated with crude preparations of periplasmatically expressed cross-species specific anti CD3 single-chain antibodies (preparation was performed as described above and according to standard protocols) and a single-chain murine anti-human CD3 antibody as negative control. As secondary antibody the Penta-His antibody (Qiagen GmbH, Hildesheim, Germany) was used at 5 μg/ml in 50 μl PBS with 2% FCS. The binding of the antibody was detected with an R-Phycoerythrin-conjugated affinity purified F(ab′)2 fragment, goat anti-mouse IgG, Fc-gamma fragment specific, diluted 1:100 in PBS with 2% FCS (Jackson ImmunoResearch Europe Ltd., Newmarket, Suffolk, UK). The samples were measured on a FACScalibur (BD biosciences, Heidelberg, Germany). As shown in FIGS. 6 (A to E) binding of single chain antibodies to the transfectants expressing the recombinant transmembrane fusion proteins consisting of the 1-27 N-terminal amino acids of CD3 epsilon of the human, marmoset, tamarin or squirrel monkey fused to cynomolgus EpCAM was observed. No binding of cross-species specific single chain antibodies was observed to a fusion protein consisting of the 1-27 N-terminal CD3 epsilon of swine fused to cynomolgus EpCAM used as negative control. Multi-primate cross-species specificity of the anti-CD3 single chain antibodies was shown. Signals obtained with the anti Flag M2 antibody and the cross-species specific single chain antibodies were comparable, indicating a strong binding activity of the cross-species specific single chain antibodies to the N-terminal amino acids 1-27 of CD3 epsilon.

### 5. Binding Analysis of Cross-Species Specific Anti-CD3 Single Chain Antibodies by Alanine-Scanning of Mouse Cells Transfected with the Human CD3 Epsilon Chain and its Alanine Mutants

### 5.1. Cloning and Expression of Human Wild-Type CD3 Epsilon

[0367] The coding sequence of the human CD3 epsilon chain was obtained by gene synthesis according to standard protocols (cDNA sequence and amino acid sequence of the human CD3 epsilon chain are listed under SEQ ID NOs 242 and 241). The gene synthesis fragment was designed as to contain a Kozak site for eukaryotic expression of the construct and restriction sites at the beginning and the end of the cDNA coding for human CD3 epsilon. The introduced restriction sites EcoRI at the 5′ end and SalI at the 3′ end, were utilized in the following cloning procedures. The gene synthesis fragment was then cloned via EcoRI and SalI into a plasmid designated pEF NEO following standard protocols. pEF NEO was derived of pEF DHFR (Mack et al. Proc. Natl. Acad. Sci. USA 92 (1995) 7021-7025) by replacing the cDNA of the DHFR with the cDNA of the neomycin resistance by conventional molecular cloning. A sequence verified plasmid was used to transfect the murine T cell line EL4 (ATCC No. TIB-39) cultivated in RPMI with stabilized L-glutamine supplemented with 10% FCS, 1% penicillin/streptomycin, 1% HEPES, 1% pyruvate, 1% non-essential amino acids (all Biochrom AG Berlin, Germany) at 37° C., 95% humidity and 7% CO₂. Transfection was performed with the SuperFect Transfection Reagent (Qiagen GmbH, Hilden, Germany) and 2 μg of plasmid DNA according to the manufacturer's protocol. After 24 hours the cells were washed with PBS and cultivated again in the aforementioned cell culture medium with 600 μg/ml G418 for selection (PAA Laboratories GmbH, Pasching, Austria). 16 to 20 days after transfection the outgrowth of resistant cells was observed. After additional 7 to 14 days cells were tested for expression of human CD3 epsilon by FACS analysis according to standard protocols. 2.5×10⁵ cells were incubated with anti-human CD3 antibody UCHT-1 (BD biosciences, Heidelberg, Germany) at 5 μg/ml in PBS with 2% FCS. The binding of the antibody was detected with an R-Phycoerythrin-conjugated affinity purified F(ab′)2 fragment, goat anti-mouse IgG, Fc-gamma fragment specific, diluted 1:100 in PBS with 2% FCS (Jackson ImmunoResearch Europe Ltd., Newmarket, Suffolk, UK). The samples were measured on a FACSCalibur (BD biosciences, Heidelberg, Germany). Expression of human wild-type CD3 on transfected EL4 cells is shown in FIG. 7.

### 5.2. Cloning and Expression of the Cross-Species Specific Anti-CD3 Single Chain Antibodies as IgG1 Antibodies

[0368] In order to provide improved means of detection of binding of the cross-species specific single chain anti-CD3 antibodies H2C HLP, A2J HLP and E2M HLP were converted into IgG1 antibodies with murine IgG1 and human lambda constant regions. cDNA sequences coding for the heavy and light chains of respective IgG antibodies were obtained by gene synthesis according to standard protocols. The gene synthesis fragments for each specificity were designed as to contain first a Kozak site to allow eukaryotic expression of the construct, which is followed by an 19 amino acid immunoglobulin leader peptide (SEQ ID NOs 244 and 243), which is followed in frame by the coding sequence of the respective heavy chain variable region or respective light chain variable region, followed in frame by the coding sequence of the heavy chain constant region of murine IgG1 (SEQ ID NOs 246 and 245) or the coding sequence of the human lambda light chain constant region (SEQ ID NO 248 and 247), respectively. Restriction sites were introduced at the beginning and the end of the cDNA coding for the fusion protein. Restriction sites EcoRI at the 5′ end and SalI at the 3′ end were used for the following cloning procedures. The gene synthesis fragments were cloned via EcoRI and SalI into a plasmid designated pEF DHFR (Mack et al. Proc. Natl. Acad. Sci. USA 92 (1995) 7021-7025) for the heavy chain constructs and pEF ADA (pEF ADA is described in Raum et al., Cancer Immunol Immunother., 50(3), (2001), 141-50) for the light chain constructs) according to standard protocols. Sequence verified plasmids were used for co-transfection of respective light and heavy chain constructs in the FreeStyle 293 Expression System (Invitrogen GmbH, Karlsruhe, Germany) according to the manufacturers protocol. After 3 days cell culture supernatants of the transfectants were harvested and used for the alanine-scanning experiment.

### 5.3. Cloning and Expression of Alanine Mutants of Human CD3 Epsilon for Alanine-Scanning

[0369] 27 cDNA fragments coding for the human CD3 epsilon chain with an exchange of one codon of the wild-type sequence of human CD3 epsilon into a codon coding for alanine (GCC) for each amino acid of amino acids 1-27 of the extracellular domain of the mature human CD3 epsilon chain respectively were obtained by gene synthesis. Except for the exchanged codon the cDNA fragments were identical to the aforementioned human wild-type CD3 cDNA fragment. Only one codon was replaced in each construct compared to the human wild-type CD3 cDNA fragment described above. Restriction sites EcoRI and SalI were introduced into the cDNA fragments at identical positions compared to the wild-type construct. All alanine-scanning constructs were cloned into pEF NEO and sequence verified plasmids were transfected into EL4 cells. Transfection and selection of transfectants was performed as described above. As result a panel of expressed constructs was obtained wherein the first amino acid of the human CD3 epsilon chain, glutamine (Q, Gln) at position 1 was replaced by alanine. The last amino acid replaced by alanine was the threonine (T, Thr) at position 27 of mature human wild-type CD3 epsilon. For each amino acid between glutamine 1 and threonine 27 respective transfectants with an exchange of the wild-type amino acid into alanine were generated.

### 5.4. Alanine-Scanning Experiment

[0370] Chimeric IgG antibodies as described in 5.2 and cross-species specific single chain antibodies specific for CD3 epsilon were tested in alanine-scanning experiment. Binding of the antibodies to the EL4 cell lines transfected with the alanine-mutant constructs of human CD3 epsilon as described in 5.3 was tested by FACS assay according to standard protocols. 2.5×10⁵ cells of the respective transfectants were incubated with 50 μl of cell culture supernatant containing the chimeric IgG antibodies or with 50 μl of crude preparations of periplasmatically expressed single-chain antibodies. For samples incubated with crude preparations of periplasmatically expressed single-chain antibodies the anti-Flag M2 antibody (Sigma-Aldrich Chemie GmbH, Taufkirchen, Germany) was used as secondary antibody at 5 μg/ml in 50 μl PBS with 2% FCS. For samples incubated with the chimeric IgG antibodies a secondary antibody was not necessary. For all samples the binding of the antibody molecules was detected with an R-Phycoerythrin-conjugated affinity purified F(ab′)2 fragment, goat anti-mouse IgG, Fc-gamma fragment specific, diluted 1:100 in PBS with 2% FCS (Jackson ImmunoResearch Europe Ltd., Newmarket, Suffolk, UK). Samples were measured on a FACSCalibur (BD biosciences, Heidelberg, Germany). Differential binding of chimeric IgG molecules or cross-species specific single-chain antibodies to the EL4 cell lines transfected with the alanine-mutants of human CD3 epsilon was detected. As negative control either an isotype control or a crude preparation of a periplasmatically expressed single-chain antibody of irrelevant specificity was used respectively. UCHT-1 antibody was used as positive control for the expression level of the alanine-mutants of human CD3 epsilon. The EL4 cell lines transfected with the alanine-mutants for the amino acids tyrosine at position 15, valine at position 17, isoleucine at position 19, valine at position 24 or leucine at position 26 of the mature CD3 epsilon chain were not evaluated due to very low expression levels (data not shown). Binding of the cross-species specific single chain antibodies and the single chain antibodies in chimeric IgG format to the EL4 cell lines transfected with the alanine-mutants of human CD3 epsilon is shown in FIG. 8 (A-D) as relative binding in arbitrary units with the geometric mean fluorescence values of the respective negative controls subtracted from all respective geometric mean fluorescence sample values. To compensate for different expression levels all sample values for a certain transfectant were then divided through the geometric mean fluorescence value of the UCHT-1 antibody for the respective transfectant. For comparison with the wild-type sample value of a specificity all sample values of the respective specificity were finally divided through the wild-type sample value, thereby setting the wild-type sample value to 1 arbitrary unit of binding.

[0371] The calculations used are shown in detail in the following formula:

$$value\_Sample ( x , y ) = \frac{Sample ( x , y ) - neg\_Contr . ( x )}{\begin{matrix}( U C H T - 1 ( x ) - neg\_Contr . ( x ) ) * \\ \frac{WT ( y ) - neg\_Contr . ( wt )}{U C H T - 1 ( wt ) - neg\_Contr . ( wt )}\end{matrix}}$$

[0372] In this equation value_Sample means the value in arbitrary units of binding depicting the degree of binding of a specific anti-CD3 antibody to a specific alanine-mutant as shown in FIG. 8 (A-D), Sample means the geometric mean fluorescence value obtained for a specific anti-CD3 antibody assayed on a specific alanine-scanning transfectant, neg_Contr. means the geometric mean fluorescence value obtained for the negative control assayed on a specific alanine-mutant, UCHT-1 means the geometric mean fluorescence value obtained for the UCHT-1 antibody assayed on a specific alanine-mutant, WT means the geometric mean fluorescence value obtained for a specific anti-CD3 antibody assayed on the wild-type transfectant, x specifies the respective transfectant, y specifies the respective anti-CD3 antibody and wt specifies that the respective transfectant is the wild-type.

[0373] As can be seen in FIG. 8 (A-D) the IgG antibody A2J HLP showed a pronounced loss of binding for the amino acids asparagine at position 4, threonine at position 23 and isoleucine at position 25 of the mature CD3 epsilon chain. A complete loss of binding of IgG antibody A2J HLP was observed for the amino acids glutamine at position 1, aspartate at position 2, glycine at position 3 and glutamate at position 5 of the mature CD3 epsilon chain. IgG antibody E2M HLP showed a pronounced loss of binding for the amino acids asparagine at position 4, threonine at position 23 and isoleucine at position 25 of the mature CD3 epsilon chain. IgG antibody E2M HLP showed a complete loss of binding for the amino acids glutamine at position 1, aspartate at position 2, glycine at position 3 and glutamate at position 5 of the mature CD3 epsilon chain. IgG antibody H2C HLP showed an intermediate loss of binding for the amino acid asparagine at position 4 of the mature CD3 epsilon chain and it showed a complete loss of binding for the amino acids glutamine at position 1, aspartate at position 2, glycine at position 3 and glutamate at position 5 of the mature CD3 epsilon chain. Single chain antibody F12Q HLP showed an essentially complete loss of binding for the amino acids glutamine at position 1, aspartate at position 2, glycine at position 3 of the mature CD3 epsilon chain and glutamate at position 5 of the mature CD3 epsilon chain.

### 6. Binding Analysis of the Cross-Species Specific Anti-CD3 Binding Molecule H2C HLP to the Human CD3 Epsilon Chain with and without N-Terminal His6 Tag Transfected into the Murine T Cell Line EL4

[0374] 6.1. Cloning and Expression of the Human CD3 Epsilon Chain with N-Terminal Six Histidine Tag (His6 Tag)

[0375] A cDNA fragment coding for the human CD3 epsilon chain with a N-terminal His6 tag was obtained by gene synthesis. The gene synthesis fragment was designed as to contain first a Kozak site for eukaryotic expression of the construct, which is followed in frame by the coding sequence of a 19 amino acid immunoglobulin leader peptide, which is followed in frame by the coding sequence of a His6 tag which is followed in frame by the coding sequence of the mature human CD3 epsilon chain (the cDNA and amino acid sequences of the construct are listed as SEQ ID NOs 256 and 255). The gene synthesis fragment was also designed as to contain restriction sites at the beginning and the end of the cDNA. The introduced restriction sites EcoRI at the 5′ end and SalI at the 3′ end, were used in the following cloning procedures. The gene synthesis fragment was then cloned via EcoRI and SalI into a plasmid designated pEF-NEO (as described above) following standard protocols. A sequence verified plasmid was used to transfect the murine T cell line EL4. Transfection and selection of the transfectants were performed as described above. After 34 days of cell culture the transfectants were used for the assay described below.

6.2. Binding of the Cross-Species Specific Anti-CD3 Binding Molecule H2C HLP to the Human CD3 Epsilon Chain with and without N-Terminal His6 Tag

[0376] A chimeric IgG antibody with the binding specificity H2C HLP specific for CD3 epsilon was tested for binding to human CD3 epsilon with and without N-terminal His6 tag. Binding of the antibody to the EL4 cell lines transfected the His6-human CD3 epsilon and wild-type human CD3 epsilon respectively was tested by an FACS assay according to standard protocols. 2.5×10⁵ cells of the transfectants were incubated with 50 μl of cell culture supernatant containing the chimeric IgG antibody or 50 μl of the respective control antibodies at 5 μg/ml in PBS with 2% FCS. As negative control an appropriate isotype control and as positive control for expression of the constructs the CD3 specific antibody UCHT-1 were used respectively. The binding of the antibodies was detected with a R-Phycoerythrin-conjugated affinity purified F(ab′)2 fragment, goat anti-mouse IgG, Fc-gamma fragment specific, diluted 1:100 in PBS with 2% FCS (Jackson ImmunoResearch Europe Ltd., Newmarket, Suffolk, UK). Samples were measured on a FACSCalibur (BD biosciences, Heidelberg, Germany). Compared to the EL4 cell line transfected with wild-type human CD3 epsilon a clear loss of binding of the chimeric IgG with binding specificity H2C HLP to human-CD3 epsilon with an N-terminal His6 tag was detected. These results showed that a free N-terminus of CD3 epsilon is essential for binding of the cross-species specific anti-CD3 binding specificity H2C HLP to the human CD3 epsilon chain (FIG. 9).

### 7. Cloning and Expression of the C-Terminal, Transmembrane and Truncated Extracellular Domains of Human MCSP

[0377] The coding sequence of the C-terminal, transmembrane and truncated extracellular domain of human MCSP (amino acids 1538-2322) was obtained by gene synthesis according to standard protocols (cDNA sequence and amino acid sequence of the recombinant construct for expression of the C-terminal, transmembrane and truncated extracellular domain of human MCSP (designated as human D3) are listed under SEQ ID NOs 250 and 249). The gene synthesis fragment was designed as to contain first a Kozak site to allow eukaryotic expression of the construct followed by the coding sequence of an 19 amino acid immunoglobulin leader peptide followed in frame by a FLAG tag, followed in frame by a sequence containing several restriction sites for cloning purposes and coding for a 9 amino acid artificial linker (SRTRSGSQL), followed in frame by the coding sequence of the C-terminal, transmembrane and truncated extracellular domain of human MCSP and a stop codon. Restriction sites were introduced at the beginning and at the end of the DNA fragment. The restriction sites EcoRI at the 5′ end and SalI at the 3′ end were used in the following cloning procedures. The fragment was digested with EcoRI and SalI and cloned into pEF-DHFR (pEF-DHFR is described in Mack et al. Proc. Natl. Acad. Sci. USA 92 (1995) 7021-7025) following standard protocols. A sequence verified plasmid was used to transfect CHO/dhfr-cells (ATCC No. CRL 9096). Cells were cultivated in RPMI 1640 with stabilized glutamine, supplemented with 10% FCS, 1% penicillin/streptomycin (all obtained from Biochrom AG Berlin, Germany) and nucleosides from a stock solution of cell culture grade reagents (Sigma-Aldrich Chemie GmbH, Taufkirchen, Germany) to a final concentration of 10 μg/ml Adenosine, 10 μg/ml Deoxyadenosine and 10 μg/ml Thymidine, in an incubator at 37° C., 95% humidity and 7% CO₂. Transfection was performed using the PolyFect Transfection Reagent (Qiagen GmbH, Hilden, Germany) and 5 μg of plasmid DNA according to the manufacturer's protocol. After cultivation for 24 hours cells were washed once with PBS and cultivated again in RPMI 1640 with stabilized glutamine and 1% penicillin/streptomycin. Thus the cell culture medium did not contain nucleosides and thereby selection was applied on the transfected cells. Approximately 14 days after transfection the outgrowth of resistant cells was observed. After an additional 7 to 14 days the transfectants were tested for expression of the construct by FACS analysis. 2.5×10⁵ cells were incubated with 50 μl of an anti-Flag-M2 antibody (Sigma-Aldrich Chemie GmbH, Taufkirchen, Germany) diluted to 5 μg/ml in PBS with 2% FCS. The binding of the antibody was detected with a R-Phycoerythrin-conjugated affinity purified F(ab′)2 fragment, goat anti-mouse IgG, Fc-gamma fragment specific diluted 1:100 in PBS with 2% FCS (ImmunoResearch Europe Ltd., Newmarket, Suffolk, UK). The samples were measured on a FACScalibur (BD biosciences, Heidelberg, Germany).

### 8. Cloning and Expression of the C-Terminal, Transmembrane and Truncated Extracellular Domains of Macaque MCSP

[0378] The cDNA sequence of the C-terminal, transmembrane and truncated extracellular domains of macaque MCSP (designated as macaque D3) was obtained by a set of three PCRs on macaque skin cDNA (Cat No. C1534218-Cy-BC; BioCat GmbH, Heidelberg, Germany) using the following reaction conditions: 1 cycle at 94° C., 3 min., 40 cycles with 94° C. for 0.5 min., 52° C. for 0.5 min. and 72° C. for 1.75 min., terminal cycle of 72° C. for 3 min. The following primers were used:

forward primer:

(SEQ ID No. 361)

5′-GATCTGGTCTACACCATCGAGC-3′
reverse primer:

(SEQ ID No. 362)

5′-GGAGCTGCTGCTGGCTCAGTGAGG-3′
forward primer:

(SEQ ID No. 363)

5′-TTCCAGCTGAGCATGTCTGATGG-3′
reverse primer:

(SEQ ID No. 364)

5′-CGATCAGCATCTGGGCCCAGG-3′
forward primer:

(SEQ ID No. 365)

5′-GTGGAGCAGTTCACTCAGCAGGACC-3′
reverse primer:

(SEQ ID No. 366)

5′-GCCTTCACACCCAGTACTGGCC-3′

[0379] Those PCRs generated three overlapping fragments (A: 1-1329, B: 1229-2428, C: 1782-2547) which were isolated and sequenced according to standard protocols using the PCR primers and thereby provided a 2547 bp portion of the cDNA sequence of macaque MCSP (the cDNA sequence and amino acid sequence of this portion of macaque MCSP are listed under SEQ ID NOs 252 and 251) from 74 bp upstream of the coding sequence of the C-terminal domain to 121 bp downstream of the stop codon. Another PCR using the following reaction conditions: 1 cycle at 94° C. for 3 min, 10 cycles with 94° C. for 1 min, 52° C. for 1 min and 72° C. for 2.5 min, terminal cycle of 72° C. for 3 min was used to fuse the PCR products of the aforementioned reactions A and B. The following primers are used:

forward primer:

(SEQ ID No. 367)

5′-tcccgtacgagatctggatcccaattggatggcggactcgtgctg
ttctcacacagagg-3′
reverse primer:

(SEQ ID No. 368)

5′-agtgggtcgactcacacccagtactggccattcttaagggca
ggg-3′

[0380] The primers for this PCR were designed to introduce restriction sites at the beginning and at the end of the cDNA fragment coding for the C-terminal, transmembrane and truncated extracellular domains of macaque MCSP. The introduced restriction sites MfeI at the 5′ end and SalI at the 3′ end, were used in the following cloning procedures. The PCR fragment was then cloned via MfeI and SalI into a Bluescript plasmid containing the EcoRI/MfeI fragment of the aforementioned plasmid pEF-DHFR (pEF-DHFR is described in Raum et al. Cancer Immunol Immunother 50 (2001) 141-150) by replacing the C-terminal, transmembrane and truncated extracellular domains of human MCSP. The gene synthesis fragment contained the coding sequences of the immunoglobulin leader peptide and the Flag tag as well as the artificial linker (SRTRSGSQL) in frame to the 5′ end of the cDNA fragment coding for the C-terminal, transmembrane and truncated extracellular domains of macaque MCSP. This vector was used to transfect CHO/dhfr-cells (ATCC No. CRL 9096). Cells were cultivated in RPMI 1640 with stabilized glutamine supplemented with 10% FCS, 1% penicillin/streptomycin (all from Biochrom AG Berlin, Germany) and nucleosides from a stock solution of cell culture grade reagents (Sigma-Aldrich Chemie GmbH, Taufkirchen, Germany) to a final concentration of 10 μg/ml Adenosine, 10 μg/ml Deoxyadenosine and 10 μg/ml Thymidine, in an incubator at 37° C., 95% humidity and 7% CO2. Transfection was performed with PolyFect Transfection Reagent (Qiagen GmbH, Hilden, Germany) and 5 μg of plasmid DNA according to the manufacturer's protocol. After cultivation for 24 hours cells were washed once with PBS and cultivated again in RPMI 1640 with stabilized glutamine and 1% penicillin/streptomycin. Thus the cell culture medium did not contain nucleosides and thereby selection was applied on the transfected cells. Approximately 14 days after transfection the outgrowth of resistant cells is observed. After an additional 7 to 14 days the transfectants were tested for expression of the recombinant construct via FACS. 2.5×10⁵ cells were incubated with 50 μl of an anti-Flag-M2 antibody (Sigma-Aldrich Chemie GmbH, Taufkirchen, Germany) diluted to 5 μg/ml in PBS with 2% FCS. Bound antibody was detected with a R-Phycoerythrin-conjugated affinity purified F(ab′)2 fragment, goat anti-mouse IgG, Fc-gamma fragment specific, diluted 1:100 in PBS with 2% FCS (Jackson ImmunoResearch Europe Ltd., Newmarket, Suffolk, UK). Samples were measured on a FACScalibur (BD biosciences, Heidelberg, Germany).

### 9. Generation and Characterisation of MCSP and CD3 Cross-Species Specific Bispecific Single Chain Molecules

[0381] Bispecific single chain antibody molecules each comprising a binding domain cross-species specific for human and non-chimpanzee primate CD3 epsilon as well as a binding domain cross-species-specific for human and non-chimpanzee primate MCSP, are designed as set out in the following Table 1:

TABLE 1
Formats of MCSP and CD3 cross-species specific bispecific single chain
antibodies

| SEQ ID | Formats of protein constructs |
|---|---|
| (nucl/prot) | (N → C) |
| 190/189 | MCSP-G4 HL × H2C HL |
| 192/191 | MCSP-G4 HL × F12Q HL |
| 194/193 | MCSP-G4 HL × I2C HL |
| 196/195 | MCSP-G4 HLP × F6A HLP |
| 198/197 | MCSP-G4 HLP × H2C HLP |
| 202/201 | MCSP-G4 HLP × G4H HLP |
| 206/205 | MCSP-G4 HLP × E1L HLP |
| 208/207 | MCSP-G4 HLP × E2M HLP |
| 212/211 | MCSP-G4 HLP × F12Q HL |
| 214/213 | MCSP-G4 HLP × I2C HL |
| 216/215 | MCSP-D2 HL × H2C HL |
| 218/217 | MCSP-D2 HL × F12Q HL |
| 220/219 | MCSP-D2 HL × I2C HL |
| 222/221 | MCSP-D2 HLP × H2C HLP |
| 224/223 | MCSP-F9 HL × H2C HL |
| 226/225 | MCSP-F9 HLP × H2C HLP |
| 228/227 | MCSP-F9 HLP × G4H HLP |
| 318/317 | MCSP-A9 HL × H2C HL |
| 320/319 | MCSP-A9 HL × F12Q HL |
| 322/321 | MCSP-A9 HL × I2C HL |
| 324/323 | MCSP-C8 HL × I2C HL |
| 328/327 | MCSP-B7 HL × I2C HL |
| 326/325 | MCSP-B8 HL × I2C HL |
| 330/329 | MCSP-G8 HL × I2C HL |
| 332/331 | MCSP-D5 HL × I2C HL |
| 334/333 | MCSP-F7 HL × I2C HL |
| 336/335 | MCSP-G5 HL × I2C HL |
| 338/337 | MCSP-F8 HL × I2C HL |
| 340/339 | MCSP-G10 HL × I2C HL |

[0382] The aforementioned constructs containing the variable heavy-chain (VH) and variable light-chain (VL) domains cross-species specific for human and macaque MCSP D3 and the VH and VL domains cross-species specific for human and macaque CD3 were obtained by gene synthesis. The gene synthesis fragments were designed as to contain first a Kozak site for eukaryotic expression of the construct, followed by a 19 amino acid immunoglobulin leader peptide, followed in frame by the coding sequence of the respective bispecific single chain antibody molecule, followed in frame by the coding sequence of a histidine₆-tag and a stop codon. The gene synthesis fragment was also designed as to introduce suitable N- and C-terminal restriction sites. The gene synthesis fragment was cloned via these restriction sites into a plasmid designated pEF-DHFR (pEF-DHFR is described in Raum et al. Cancer Immunol Immunother 50 (2001) 141-150) according to standard protocols (Sambrook, Molecular Cloning; A Laboratory Manual, 3rd edition, Cold Spring Harbour Laboratory Press, Cold Spring Harbour, N.Y. (2001)). The constructs were transfected stably or transiently into DHFR-deficient CHO-cells (ATCC No. CRL 9096) by electroporation or alternatively into HEK 293 (human embryonal kidney cells, ATCC Number: CRL-1573) in a transient manner according to standard protocols.

[0383] Eukaryotic protein expression in DHFR deficient CHO cells was performed as described by Kaufmann R. J. (1990) Methods Enzymol. 185, 537-566. Gene amplification of the constructs was induced by addition of increasing concentrations of methothrexate (MTX) up to final concentrations of 20 nM MTX. After two passages of stationary culture the cells were grown in roller bottles with nucleoside-free HyQ PF CHO liquid soy medium (with 4.0 mM L-Glutamine with 0.1% Pluronic F-68; HyClone) for 7 days before harvest. The cells were removed by centrifugation and the supernatant containing the expressed protein is stored at −20° C.

[0384] Äkta® Explorer System (GE Health Systems) and Unicorn® Software were used for chromatography. Immobilized metal affinity chromatography (“IMAC”) was performed using a Fractogel EMD Chelate® (Merck) which was loaded with ZnCl₂ according to the protocol provided by the manufacturer. The column was equilibrated with buffer A (20 mM sodium phosphate buffer pH 7.2, 0.1 M NaCl) and the cell culture supernatant (500 ml) was applied to the column (10 ml) at a flow rate of 3 ml/min. The column was washed with buffer A to remove unbound sample. Bound protein was eluted using a two step gradient of buffer B (20 mM sodium phosphate buffer pH 7.2, 0.1 M NaCl, 0.5 M Imidazole) according to the following:

Step 1: 20% buffer B in 6 column volumes
Step 2: 100% buffer B in 6 column volumes

[0385] Eluted protein fractions from step 2 were pooled for further purification. All chemicals are of research grade and purchased from Sigma (Deisenhofen) or Merck (Darmstadt).

[0386] Gel filtration chromatography was performed on a HiLoad 16/60 Superdex 200 prep grade column (GE/Amersham) equilibrated with Equi-buffer (25 mM Citrate, 200 mM Lysine, 5% Glycerol, pH 7.2). Eluted protein samples (flow rate 1 ml/min) were subjected to standard SDS-PAGE and Western Blot for detection. Prior to purification, the column was calibrated for molecular weight determination (molecular weight marker kit, Sigma MW GF-200). Protein concentrations were determined using OD280 nm.

[0387] Purified bispecific single chain antibody protein was analyzed in SDS PAGE under reducing conditions performed with pre-cast 4-12% Bis Tris gels (Invitrogen). Sample preparation and application were performed according to the protocol provided by the manufacturer. The molecular weight was determined with MultiMark protein standard (Invitrogen). The gel was stained with colloidal Coomassie (Invitrogen protocol). The purity of the isolated protein is >95% as determined by SDS-PAGE.

[0388] The bispecific single chain antibody has a molecular weight of about 52 kDa under native conditions as determined by gel filtration in phosphate buffered saline (PBS). All constructs were purified according to this method.

[0389] Western Blot was performed using an Optitran® BA-S83 membrane and the Invitrogen Blot Module according to the protocol provided by the manufacturer. For detection of the bispecific single chain antibody protein antibodies an anti-His Tag antibody was used (Penta His, Qiagen). A Goat-anti-mouse Ig antibody labeled with alkaline phosphatase (AP) (Sigma) was used as secondary antibody and BCIP/NBT (Sigma) as substrate. A single band was detected at 52 kD corresponding to the purified bispecific single chain antibody.

[0390] Alternatively, constructs were transiently expressed in DHFR deficient CHO cells. In brief, 4×105 cells per construct were cultivated in 3 ml RPMI 1640 all medium with stabilized glutamine supplemented with 10% fetal calf serum, 1% penicillin/streptomycin and nucleosides from a stock solution of cell culture grade reagents (Sigma-Aldrich Chemie GmbH, Taufkirchen, Germany) to a final concentration of 10 μg/ml Adenosine, 10 μg/ml Deoxyadenosine and 10 μg/ml Thymidine, in an incubator at 37° C., 95% humidity and 7% CO2 one day before transfection. Transfection was performed with Fugene 6 Transfection Reagent (Roche, #11815091001) according to the manufacturer's protocol. 94 μl OptiMEM medium (Invitrogen) and 6 μl Fugene 6 are mixed and incubated for 5 minutes at room temperature. Subsequently, 1.5 μg DNA per construct were added, mixed and incubated for 15 minutes at room temperature. Meanwhile, the DHFR deficient CHO cells were washed with 1×PBS and resuspended in 1.5 ml RPMI 1640 all medium. The transfection mix was diluted with 600 μl RPMI 1640 all medium, added to the cells and incubated overnight at 37° C., 95% humidity and 7% CO2. The day after transfection the incubation volume of each approach was extended to 5 ml RPMI 1640 all medium. Supernatant was harvested after 3 days of incubation.

### 10. Flow Cytometric Binding Analysis of the MCSP and CD3 Cross-Species Specific Bispecific Antibodies

[0391] In order to test the functionality of the cross-species specific bispecific antibody constructs regarding the capability to bind to human and macaque MCSP D3 and CD3, respectively, a FACS analysis was performed. For this purpose CHO cells transfected with human MCSP D3 (as described in Example 7) and the human CD3 positive T cell leukemia cell line HPB-ALL (DSMZ, Braunschweig, ACC483) were used to test the binding to human antigens. The binding reactivity to macaque antigens was tested by using the generated macaque MCSP D3 transfectant (described in Example 8) and a macaque T cell line 4119LnPx (kindly provided by Prof. Fickenscher, Hygiene Institute, Virology, Erlangen-Nuernberg; published in Knappe A, et al., and Fickenscher H., Blood 2000, 95, 3256-61). 200.000 cells of the respective cell lines were incubated for 30 min on ice with 50 μl of the purified protein of the cross-species specific bispecific antibody constructs (2 μg/ml) or cell culture supernatant of transfected cells expressing the cross-species specific bispecific antibody constructs. The cells were washed twice in PBS with 2% FCS and binding of the construct was detected with a murine anti-His antibody (Penta His antibody; Qiagen; diluted 1:20 in 50 μl PBS with 2% FCS). After washing, bound anti-His antibodies were detected with an Fc gamma-specific antibody (Dianova) conjugated to phycoerythrin, diluted 1:100 in PBS with 2% FCS. Supernatant of untransfected CHO cells was used as negative control for binding to the T cell lines. A single chain construct with irrelevant target specificity was used as negative control for binding to the MCSP-D3 transfected CHO cells.

[0392] Flow cytometry was performed on a FACS-Calibur apparatus; the CellQuest software was used to acquire and analyze the data (Becton Dickinson biosciences, Heidelberg). FACS staining and measuring of the fluorescence intensity were performed as described in Current Protocols in Immunology (Coligan, Kruisbeek, Margulies, Shevach and Strober, Wiley-Interscience, 2002).

[0393] The bispecific binding of the single chain molecules listed above, which are cross-species specific for MCSP D3 and cross-species specific for human and macaque CD3 was clearly detectable as shown in FIGS. 10, 11, 12 and 39. In the FACS analysis all constructs showed binding to CD3 and MCSP D3 as compared to the respective negative controls. Cross-species specificity of the bispecific antibodies to human and macaque CD3 and MCSP D3 antigens was demonstrated.

### 11. Bioactivity of MCSP and CD3 Cross-Species Specific Bispecific Single Chain Antibodies

[0394] Bioactivity of the generated bispecific single chain antibodies was analyzed by chromium 51 (⁵¹Cr) release in vitro cytotoxicity assays using the MCSP D3 positive cell lines described in Examples 7 and 8. As effector cells stimulated human CD4/CD56 depleted PBMC, stimulated human PBMC or the macaque T cell line 4119LnPx are used as specified in the respective figures.

[0395] Generation of the stimulated CD4/CD56 depleted PBMC was performed as follows: Coating of a Petri dish (145 mm diameter, Greiner bio-one GmbH, Kremsmünster) was carried out with a commercially available anti-CD3 specific antibody (e.g. OKT3, Othoclone) in a final concentration of 1 μg/ml for 1 hour at 37° C. Unbound protein was removed by one washing step with PBS. The fresh PBMC were isolated from peripheral blood (30-50 ml human blood) by Ficoll gradient centrifugation according to standard protocols. 3-5×10⁷ PBMC were added to the precoated petri dish in 120 ml of RPMI 1640 with stabilized glutamine/10% FCS/IL-2 20 U/ml (Proleukin, Chiron) and stimulated for 2 days. On the third day the cells were collected and washed once with RPMI 1640. IL-2 was added to a final concentration of 20 U/ml and the cells were cultivated again for one day in the same cell culture medium as above. By depletion of CD4+ T cells and CD56+ NK cells according to standard protocols CD8+ cytotoxic T lymphocytes (CTLs) were enriched.

[0396] Target cells were washed twice with PBS and labelled with 11.1 MBq ⁵¹Cr in a final volume of 100 μl RPMI with 50% FCS for 45 minutes at 37° C. Subsequently the labelled target cells were washed 3 times with 5 ml RPMI and then used in the cytotoxicity assay. The assay was performed in a 96 well plate in a total volume of 250 μl supplemented RPMI (as above) with an E:T ratio 10:1. 1 μg/ml of the cross-species specific bispecific single chain antibody molecules and 20 threefold dilutions thereof were applied. If using supernatant containing the cross-species specific bispecific single chain antibody molecules, 21 two- and 20 threefold dilutions thereof were applied for the macaque and the human cytotoxicity assay, respectively. The assay time was 18 hours and cytotoxicity was measured as relative values of released chromium in the supernatant related to the difference of maximum lysis (addition of Triton-X) and spontaneous lysis (without effector cells). All measurements were done in quadruplicates. Measurement of chromium activity in the supernatants was performed with a Wizard 3″ gamma counter (Perkin Elmer Life Sciences GmbH, Köln, Germany). Analysis of the experimental data was performed with Prism 4 for Windows (version 4.02, GraphPad Software Inc., San Diego, Calif., USA). Sigmoidal dose response curves typically have R² values >0.90 as determined by the software. EC₅₀ values calculated by the analysis program were used for comparison of bioactivity.

[0397] As shown in FIGS. 13 to 17 and 40, all of the generated cross-species specific bispecific single chain antibody constructs demonstrate cytotoxic activity against human MCSP D3 positive target cells elicited by stimulated human CD4/CD56 depleted PBMC or stimulated PBMC and against macaque MCSP D3 positive target cells elicited by the macaque T cell line 4119LnPx.

### 12. Plasma Stability of MCSP and CD3 Cross-Species Specific Bispecific Single Chain Antibodies

[0398] Stability of the generated bispecific single chain antibodies in human plasma was analyzed by incubation of the bispecific single chain antibodies in 50% human Plasma at 37° C. and 4° C. for 24 hours and subsequent testing of bioactivity. Bioactivity was studied in a chromium 51 (⁵¹Cr) release in vitro cytotoxicity assay using a MCSP positive CHO cell line (expressing MCSP as cloned according to example 14 or 15) as target and stimulated human CD8 positive T cells as effector cells.

[0399] EC₅₀ values calculated by the analysis program as described above were used for comparison of bioactivity of bispecific single chain antibodies incubated with 50% human plasma for 24 hours at 37° C. and 4° C. respectively with bispecific single chain antibodies without addition of plasma or mixed with the same amount of plasma immediately prior to the assay.

[0400] As shown in FIG. 18 and Table 2 the bioactivity of the G4 H-L×I2C H-L, G4 H-L×H2C H-L and G4 H-L×F12Q H-L bispecific antibodies was not significantly reduced as compared with the controls without the addition of plasma or with addition of plasma immediately before testing of bioactivity.

TABLE 2
bioactivity of the bispecific antibodies without or with the addition
of Plasma

| Construct | Without plasma | With plasma | Plasma 37° C. | Plasma 4° C. |
|---|---|---|---|---|
| G4 H-L × | 300 | 796 | 902 | 867 |
| I2C H-L | | | | |
| G4 H-L × | 496 | 575 | 2363 | 1449 |
| H2C H-L | | | | |
| G4 H-L × | 493 | 358 | 1521 | 1040 |
| F12Q H-L | | | | |

### 13. Redistribution of Circulating T Cells in the Absence of Circulating Target Cells by First Exposure to CD3 Binding Molecules Directed at Conventional i.e. Context Dependent CD3 Epitopes is a Major Risk Factor for Adverse Events Related to the Initiation of Treatment

[0401] T Cell Redistribution in Patients with B-Cell Non-Hodgkin-Lymphoma (B-NHL) Following Initiation of Treatment with the Conventional CD3 Binding Molecule

[0402] A conventional CD19×CD3 binding molecules is a CD3 binding molecule of the bispecific tandem scFv format (Loffler (2000, Blood, Volume 95, Number 6) or WO 99/54440). It consists of two different binding portions directed at (i) CD19 on the surface of normal and malignant human B cells and (ii) CD3 on human T cells. By crosslinking CD3 on T cells with CD19 on B cells, this construct triggers the redirected lysis of normal and malignant B cells by the cytotoxic activity of T cells. The CD3 epitope recognized by such a conventional CD3 binding molecule is localized on the CD3 epsilon chain, where it only takes the correct conformation if it is embedded within the rest of the epsilon chain and held in the right position by heterodimerization of the epsilon chain with either the CD3 gamma or delta chain. Interaction of this highly context dependent epitope with a conventional CD3 binding molecule (see e.g. Loffler (2000, Blood, Volume 95, Number 6) or WO 99/54440)—even when it occurs in a purely monovalent fashion and without any crosslinking—can induce an allosteric change in the conformation of CD3 leading to the exposure of an otherwise hidden proline-rich region within the cytoplasmic domain of CD3 epsilon. Once exposed, the proline-rich region can recruit the signal transduction molecule Nck2, which is capable of triggering further intracellular signals. Although this is not sufficient for full T cell activation, which definitely requires crosslinking of several CD3 molecules on the T cell surface, e.g. by crosslinking of several anti-CD3 molecules bound to several CD3 molecules on a T cell by several CD19 molecules on the surface of a B cell, pure monovalent interaction of conventional CD3 binding molecules to their context dependent epitope on CD3 epsilon is still not inert for T cells in terms of signalling. Without being bound by theory, monovalent conventional CD3 binding molecules (known in the art) may induce some T cell reactions when infused into humans even in those cases where no circulating target cells are available for CD3 crosslinking. An important T cell reaction to the intravenous infusion of monovalent conventional CD19×CD3 binding molecule into B-NHL patients who have essentially no circulating CD19-positive B cells is the redistribution of T cells after start of treatment. It has been found in a phase I clinical trial that this T cell reaction occurs during the starting phase of intravenous CD19×CD3 binding molecule infusion in all individuals without circulating CD19-positive target B cells essentially independent of the CD19×CD3 binding molecule dose (FIG. 19). However, sudden increases in CD19×CD3 binding molecule exposure have been found to trigger virtually the same redistributional T cell reaction in these patients as the initial exposure of T cells to CD19×CD3 binding molecule at treatment start (FIG. 20 A) and even gradual increases in CD19×CD3 binding molecule exposure still can have redistributional effects on circulating T cells (FIG. 21). Moreover, it has been found that this essentially dose-independent redistributional T cell reaction in the absence of circulating target cells as triggered by conventional CD3 binding molecules like the CD19×CD3 binding molecule (e.g. disclosed in WO 99/54440) in 100% of all treated individuals is a major risk factor for adverse events related to the initiation of treatment.

[0403] According to the study protocol, patients with relapsed histologically confirmed indolent B-cell Non-Hodgkin-Lymphoma (B-NHL) including mantle cell lymphoma were recruited in an open-label, multi-center phase I interpatient dose-escalation trial. The study protocol was approved by the independent ethics committees of all participating centers and sent for notification to the responsible regulatory authority. Measurable disease (at least one lesion ≧1.5 cm) as documented by CT scan was required for inclusion into the study. Patients received conventional CD19×CD3 binding molecule by continuous intravenous infusion with a portable minipump system over four weeks at constant flow rate (i.e. dose level). Patients were hospitalized during the first two weeks of treatment before they were released from the hospital and continued treatment at home. Patients without evidence of disease progression after four weeks were offered to continue treatment for further four weeks. So far six different dose levels were tested without reaching a maximum tolerated dose (MTD): 0.5, 1.5, 5, 15, 30 and 60 μg/m²/24 h. Cohorts consisted of three patients each if no adverse events defined by the study protocol as DLT (dose limiting toxicity) were observed. In case of one DLT among the first three patients the cohort was expanded to six patients, which—in the absence of a second DLT—allowed further dose escalation. Accordingly, dose levels without DLT in cohorts with 3 patients or with one DLT in cohorts with 6 patients were regarded as safe. Study treatment was stopped in all patients who developed a DLT. At 15 and 30 μg/m²/24 h different modes of treatment initiation during the first 24 h were tested in several additional cohorts: (i) Stepwise increase after 5 μg/m²/24 h for the first 24 h to 15 μg/m²/24 h maintenance dose (patient cohort 15-step), (ii) even continuous increase of flow-rate from almost zero to 15 or 30 μg/m²/24 h (patient cohorts 15-ramp and 30-ramp) and (iii) start with the maintenance dose from the very beginning (patient cohorts 15-flat, 30-flat and 60-flat). Patient cohorts at dose levels 0.5, 1.5 and 5 μg/m²/24 h were all started with the maintenance dose from the very beginning (i.e. flat initiation).

[0404] Time courses of absolute B- and T-cell counts in peripheral blood were determined by four color FACS analysis as follows:

### Collection of Blood Samples and Routine Analysis

[0405] In patient cohorts 15-ramp, 15-flat, 30-ramp, 30-flat and 60-flat blood samples (6 ml) were obtained before and 0.75, 2, 6, 12, 24, 30, 48 hours after start of CD19×CD3 binding molecule (as disclosed in WO 99/54440) infusion as well as on treatment days 8, 15, 17, 22, 24, 29, 36, 43, 50, 57 and 4 weeks after end of conventional CD19×CD3 binding molecule infusion using EDTA-containing Vacutainer™ tubes (Becton Dickinson) which were shipped for analysis at 4° C. In patient cohorts 15-step blood samples (6 ml) were obtained before and 6, 24, 30, 48 hours after start of CD19×CD3 binding molecule infusion as well as on treatment days 8, 15, 22, 29, 36, 43, 50, 57 and 4 weeks after end of CD19×CD3 binding molecule infusion. At dose levels 0.5, 1.5 and 5 μg/m²/24 h blood samples (6 ml) were obtained before and 6, 24, 48 hours after start of CD19×CD3 binding molecule infusion as well as on treatment days 8, 15, 22, 29, 36, 43, 50, 57 and 4 weeks after end of CD19×CD3 binding molecule infusion. In some cases slight variations of these time points occurred for operational reasons. FACS analysis of lymphocyte subpopulations was performed within 24-48 h after blood sample collection. Absolute numbers of leukocyte subpopulations in the blood samples were determined through differential blood analysis on a CoulterCounter™ (Coulter).

Isolation of PBMC from Blood Samples

[0406] PBMC (peripheral blood mononuclear cells) isolation was performed by an adapted Ficoll™ gradient separation protocol. Blood was transferred at room temperature into 10 ml Leucosep™ tubes (Greiner) pre-loaded with 3 ml Biocoll™ solution (Biochrom). Centrifugation was carried out in a swing-out rotor for 15 min at 1700×g and 22° C. without deceleration. The PBMC above the Biocoll™ layer were isolated, washed once with FACS buffer (PBS/2% FBS [Foetal Bovine Serum; Biochrom]), centrifuged and resuspended in FACS buffer. Centrifugation during all wash steps was carried out in a swing-out rotor for 4 min at 800×g and 4° C. If necessary, lysis of erythrocytes was performed by incubating the isolated PBMC in 3 ml erythrocyte lysis buffer (8.29 g NH₄Cl, 1.00 g KHCO₃, 0.037 g EDTA, ad 1.0 l H₂O_{bidest}, pH 7.5) for 5 min at room temperature followed by a washing step with FACS buffer.

Staining of PBMC with Fluorescence-Labeled Antibodies Against Cell Surface Molecules

[0407] Monoclonal antibodies were obtained from Invitrogen (¹Cat. No. MHCD1301, ²Cat. No. MHCD1401), Dako (⁵Cat. No. C7224) or Becton Dickinson (³Cat. No. 555516, ⁴Cat. No. 345766) used according to the manufacturers' recommendations. 5×10⁵-1×10⁶ cells were stained with the following antibody combination: anti-CD13¹/anti-CD14² (FITC)×anti-CD56³ (PE)×anti-CD3⁴ (PerCP)×anti-CD19⁵ (APC). Cells were pelleted in V-shaped 96 well multititer plates (Greiner) and the supernatant was removed. Cell pellets were resuspended in a total volume of 100 μl containing the specific antibodies diluted in FACS buffer. Incubation was carried out in the dark for 30 min at 4° C. Subsequently, samples were washed twice with FACS buffer and cell pellets were resuspended in FACS buffer for flowcytometric analysis.

### Flowcytometric Detection of Stained Lymphocytes by FACS

[0408] Data collection was performed with a 4 color BD FACSCalibur™ (Becton Dickinson). For each measurement 1×10⁴ cells of defined lymphocyte subpopulations were acquired. Statistical analysis was performed with the program CellQuest Pro™ (Becton Dickinson) to obtain lymphocyte subpopulation percentages and to classify cell surface molecule expression intensity. Subsequently, percentages of single lymphocyte subsets related to total lymphocytes (i.e. B plus T plus NK cells excluding any myeloid cells via CD13/14-staining) as determined by FACS were correlated with the lymphocyte count from the differential blood analysis to calculate absolute cell numbers of T cells (CD3⁺, CD56⁻, CD13/14⁻) and B cells (CD19⁺, CD13/14⁻).

[0409] T cell redistribution during the starting phase of conventional CD19×CD3 binding molecule (e.g. disclosed in WO 99/54440) treatment in all those patients who had essentially no circulating CD19-positive B cells at treatment start is shown in (FIG. 19). For comparison, a representative example of T cell redistribution during the starting phase of CD19×CD3 binding molecule treatment in a patient with a significant number of circulating CD19-positive B cells is shown in FIG. 22.

[0410] In both cases (i.e. essentially no or many circulating B cells) circulating T cell counts rapidly decrease upon treatment start. However, in the absence of circulating B cells T cells tend to return into the circulating blood very early, while the return of T cells into the circulating blood of those patients who have a significant number of circulating B cells at treatment start is usually delayed until these circulating B cells are depleted. Thus, the T cell redistribution patterns mainly differ in the kinetics of T cell reappearance in the circulating blood.

[0411] Assessment of efficacy based on CT scan was carried out by central reference radiology after 4 weeks of treatment and in patients receiving additional 4 weeks also after 8 weeks of treatment plus in all cases four weeks after end of treatment. Disappearance and/or normalization in size of all known lesions (including an enlarged spleen) plus clearance of bone marrow from lymphoma cells in cases of bone marrow infiltration was counted as complete response (CR). Reduction by at least 50% from baseline of the sum of products of the two biggest diameters (SPD) of each predefined target lesion was defined as partial response (PR); a reduction by at least 25% was regarded a minimal response (MR). Progressive disease (PD) was defined as ≧50% increase of SPD from baseline. SPD deviations from baseline between +50% and −25% were regarded as stable disease (SD).

[0412] Patient demographics, doses received and clinical outcome in 34 patients are summarized in Table 3. Clinical anti-tumor activity of the CD19×CD3 binding molecule was clearly dose dependent: Consistent depletion of circulating CD19-positive B (lymphoma) cell from peripheral blood was observed from 5 μg/m²/24 h onwards. At 15 μg/m²/24 h and 30 μg/m²/24 h first objective clinical responses (PRs and CRs) were recorded as well as cases of partial and complete elimination of B lymphoma cells from infiltrated bone marrow. Finally, at 60 μg/m²/24 h the response rate increased to 100% (PRs and CRs) and bone marrow clearance from B lymphoma cells was complete in all evaluable cases.

[0413] The CD19×CD3 binding molecule was well tolerated by the majority of patients. Most frequent adverse events of grades 1-4 in 34 patients, regardless of causality are summarized in Table 4. CD19×CD3 binding molecule-related adverse events usually were transient and fully reversible. In particular, there were 2 patients (patients #19 and #24 in Table 3) essentially without circulating CD19-positive B cells whose treatment was stopped early because of CNS adverse events (lead symptoms: confusion and disorientation) related to repeated T cell redistribution during the starting phase of CD19×CD3 binding molecule infusion.

[0414] One of these patients (#19) was in cohort 15-step. He received 5 μg/m²/24 h CD19×CD3 binding molecule for the first 24 h followed by sudden increase to 15 μg/m²/24 h maintenance dose. The corresponding T cell redistribution pattern shows that circulating T cell counts rapidly decreased upon start of infusion at 5 μg/m²/24 h followed by early reappearance of T cells in the circulating blood essentially without circulating CD19-positive B cells. As a consequence, the peripheral T cell counts had fully recovered when the CD19×CD3 binding molecule dose was increased after 24 h from 5 to 15 μg/m²/24 h. Therefore the dose step could trigger a second episode of T cell redistribution as shown in FIG. 20 A. This repeated T cell redistribution was related with CNS side effects (lead symptoms: confusion and disorientation) in this patient, which led to the stop of infusion. The relationship between repeated T cell redistribution and such CNS adverse events was also observed in previous phase I clinical trials in B-NHL patients who received CD19×CD3 binding molecule (e.g. disclosed in WO 99/54440) as repeated bolus infusion for 2 to 4 hours each usually followed by 2 days of treatment free interval (FIG. 20 B). Every single bolus infusion triggered one episode of T cell redistribution consisting of a fast decrease in circulating T cell counts and T cell recovery prior to the next bolus infusion. In total, CNS adverse events related to repeated T cell redistribution were observed in 5 out of 21 patients. FIG. 20 B shows the representative example of one patient from the bolus infusion trials, who developed CNS symptoms after the third episode of T cell redistribution. Typically, patients with CNS adverse events in the bolus infusion trials also had low circulating B cell counts.

[0415] The second patient (#24) from the continuous infusion trial, whose treatment was stopped early because of CNS adverse events (lead symptoms: confusion and disorientation) related to repeated T cell redistribution during the starting phase of CD19×CD3 binding molecule infusion, was in cohort 15-flat. By mistake, this patient received an CD19×CD3 binding molecule infusion without additional HSA as required for stabilization of the drug. The resulting uneven drug flow triggered repeated episodes of T cell redistribution instead of only one (FIG. 23 A) with the consequence that the infusion had to be stopped because of developing CNS symptoms. Yet, when the same patient was restarted correctly with CD19×CD3 binding molecule solution containing additional HSA for drug stabilization (e.g. disclosed in WO 99/54440), no repeated T cell redistribution was observed and the patient did not again develop any CNS symptoms (FIG. 23 B). Because this patient also had essentially no circulating B cells, the circulating T cells could react with fast redistribution kinetics even to subtle changes in drug exposure as observed. The CNS adverse events related to T cell redistribution in patients who have essentially no circulating target cells can be explained by a transient increase of T cell adhesiveness to the endothelial cells followed by massive simultaneous adhesion of circulating T cells to the blood vessel walls with a consecutive drop of T cell numbers in the circulating blood as observed. The massive simultaneous attachment of T cells to the blood vessel walls can cause an increase in endothelial permeability and endothelial cell activation. The consequences of increased endothelial permeability are fluid shifts from the intravascular compartment into interstitial tissue compartments including the CNS interstitium. Endothelial cell activation by attached T cells can have procoagulatory effects (Monaco et al. J Leukoc Biol 71 (2002) 659-668) with possible disturbances in blood flow (including cerebral blood flow) particularly with regard to capillary microcirculation. Thus, CNS adverse events related to T cell redistribution in patients essentially without circulating target cells can be the consequence of capillary leak and/or disturbances in capillary microcirculation through adherence of T cells to endothelial cells. The endothelial stress caused by one episode of T cell redistribution is tolerated by the majority of patients, while the enhanced endothelial stress caused by repeated T cell redistribution frequently causes CNS adverse events. More than one episode of T cell redistribution may be less risky only in patients who have low baseline counts of circulating T cells. However, also the limited endothelial stress caused by one episode of T cell redistribution can cause CNS adverse events in rare cases of increased susceptibility for such events as observed in 1 out of 21 patients in the bolus infusion trials with the CD19×CD3 binding molecule.

[0416] Without being bound by theory, the transient increase of T cell adhesiveness to the endothelial cells in patients who have essentially no circulating target cells can be explained as T cell reaction to the monovalent interaction of a conventional CD3 binding molecule, like the CD19×CD3 binding molecule (e.g. WO 99/54440), to its context dependent epitope on CD3 epsilon resulting in an allosteric change in the conformation of CD3 followed by the recruitment of Nck2 to the cytoplasmic domain of CD3 epsilon as described above. As Nck2 is directly linked to integrins via PINCH and ILK (FIG. 28), recruitment of Nck2 to the cytoplasmic domain of CD3 epsilon following an allosteric change in the conformation of CD3 through binding of a conventional CD3 binding molecule, like the CD19×CD3 binding molecule, to its context dependent epitope on CD3 epsilon, can increase the adhesiveness of T cells to endothelial cells by transiently switching integrins on the T cell surface into their more adhesive isoform via inside-out-signalling.

TABLE 3
Patient demographics and clinical outcome

| | | | | | | Best |
|---|---|---|---|---|---|---|
| | | | | | | Response* |
| | | | Disease | | | (CR Duration |
| | | Age/ | (Ann Arbor | Dose Level | Clearance of | in Months or |
| Cohort | Patient | Sex | Classification) | [mg/m²/Day] | Bone Marrow | Weeks) |
| 1 | 1 | 71/m | IC, Binet C | 0.0005 | None | SD |
| | 2 | 67/f | MCL, Stage | 0.0005 | n.d. | PD |
| | | | IV/A/E | | | |
| | 3 | 67/m | CLL, Stage | 0.0005 | n.d. | MR |
| | | | IV/B/E | | | |
| 2 | 4 | 69/m | MCL, Stage | 0.0015 | n.i. | SD |
| | | | IV/B | | | |
| | 5 | 49/m | MCL, Stage | 0.0015 | n.d. | SD |
| | | | IV/A/S | | | |
| | 6 | 71/m | MCL, Stage | 0.0015 | n.i. | PD |
| | | | IV/B/E | | | |
| | 7 | 77/m | MCL, Stage | 0.0015 | n.i. | SD |
| | | | IV/B/E/S | | | |
| | 8 | 65/m | CLL, Stage | 0.0015 | n.d. | PD |
| | | | IV/B/E/S | | | |
| | 9 | 75/m | FL, Stage II/B | 0.0015 | n.i. | SD |
| 3 | 10 | 58/m | MCL, Stage | 0.005 | n.i. | PD |
| | | | III/B/S | | | |
| | 11 | 68/f | FL, Stage IV/B | 0.005 | n.d. | SD |
| | 12 | 65/m | MCL, Stage | 0.005 | n.i. | SD |
| | | | III/A/E | | | |
| 4^{a} | 13 | 60/m | SLL, Stage | 0.015 | Complete | PR |
| | | | IV/B/S | | | |
| | 14 | 73/m | MCL, Stage | 0.015 | n.i. | SD |
| | | | II/A/E | | | |
| | 15 | 44/m | FL, Stage | 0.015 | Partial | PR |
| | | | IV/B/E/S | | | |
| | 16 | 61/m | FL, Stage | 0.015 | Complete | CR (7 mo) |
| | | | IV/A/S | | | |
| | 17 | 67/m | MZL, Stage | 0.015 | n.i. | n.e. |
| | | | IV/B/S | | | |
| | 18 | 64/m | FL, Stage | 0.015 | n.i. | PD |
| | | | IV/A/E | | | |
| | 19 | 75/m | MCL, Stage | 0.015 | n.i. | n.e. |
| | | | III/A | | | |
| | 20 | 65/f | FL; Stage III/A | 0.015 | n.i. | SD |
| | 21 | 60/m | MCL, Stage | 0.015 | None | SD |
| | | | IV/A/E | | | |
| | 22 | 67/f | FL, Stage IV/B | 0.015 | Complete | MR |
| | 23 | 67/m | DLBCL, Stage | 0.015 | n.i. | n.e. |
| | | | III/B | | | |
| | 24 | 65/f | FL, Stage III/A | 0.015 | n.d. | SD |
| | 25 | 74/f | WD, Stage IV/B | 0.015 | Partial | SD |
| 5 | 26 | 67/m | MCL, Stage | 0.03 | Complete | SD |
| | | | IV/A | | | |
| | 27 | 48/m | FL, Stage III/A | 0.03 | n.i. | PD |
| | 28 | 58/m | MCL, Stage | 0.03 | n.i. | CR (10 mo+) |
| | | | III/A | | | |
| | 29 | 45/f | MCL, Stage | 0.03 | Partial | PD |
| | | | IV/B | | | |
| | 30 | 59/m | MZL, Stage | 0.03 | n.i. | n.e. |
| | | | III/A | | | |
| | 31 | 43/m | FL, Stage III/A | 0.03 | n.i. | MR |
| 6 | 32 | 72/m | MCL, Stage | 0.06 | Complete | PR |
| | | | IV/A | | | |
| | 33 | 55/m | MCL, Stage | 0.06 | Complete | CR (4 mo+) |
| | | | IV/B | | | |
| | 34 | 52/m | FL, Stage IV/A | 0.06 | n.i. | CR^{b} (1 w+) |

*Centrally confirmed complete (CR) and partial (PR) responses by Cheson criteria in bold; MR, minimal response (≧25 to <50%); SD, stable disease; PD, progressive disease; duration from first documentation of response in parentheses; + denotes an ongoing response
^{a}Cohort 4 was expanded to study three different schedules of treatment initiation
^{b}PR after 8 weeks of treatment that turned into a CR after an additional treatment cycle of 4 weeks at the same dose following 7 weeks of treatment free interval
n.e.: not evaluable, because of treatment period <7 d
n.d.: not determined (infiltrated, but no second biopsy performed at end of treatment)
n.i.: not infiltrated at start of treatment

TABLE 4
Incidence of adverse events observed during treatment

| Adverse events regardless of relationship, | | |
|---|---|---|
| occuring in ≧3 patients | Grade 1-4 | Grade 3-4 |
| (N = 34) | N (%) | N (%) |
| Pyrexia | 22 (64.7) | 2 (5.9) |
| Leukopenia | 21 (61.8) | 11 (32.4) |
| Lymphopenia | 21 (61.8) | 21 (61.8) |
| Coagulopathy (increase in D-dimers) | 16 (47.1) | 6 (17.6) |
| Enzyme abnormality (AP, LDH, CRP) | 16 (47.1) | 10 (29.4) |
| Hepatic function abnormality (ALT, AST, GGT) | 16 (47.1) | 1 (2.9) |
| Anaemia | 13 (38.2) | 5 (14.7) |
| Chills | 13 (38.2) | 0 (0.0) |
| Headache | 12 (35.3) | 1 (2.9) |
| Hypokalaemia | 12 (35.3) | 2 (5.9) |
| Thrombocytopenia | 12 (35.3) | 6 (17.6) |
| Weight increased | 12 (35.3) | 0 (0.0) |
| Hyperglycaemia | 11 (32.4) | 2 (5.9) |
| Neutropenia | 11 (32.4) | 8 (23.5) |
| Haematuria | 10 (29.4) | 0 (0.0) |
| Oedema peripheral | 10 (29.4) | 2 (5.9) |
| Anorexia | 9 (26.5) | 1 (2.9) |
| Diarrhoea | 9 (26.5) | 0 (0.0) |
| Weight decreased | 9 (26.5) | 0 (0.0) |
| Fatigue | 8 (23.5) | 1 (2.9) |
| Proteinuria | 8 (23.5) | 0 (0.0) |
| Hypocalcaemia | 7 (20.6) | 2 (5.9) |
| Pancreatic enzyme abnormality | 7 (20.6) | 0 (0.0) |
| Cough | 6 (17.6) | 0 (0.0) |
| Dyspnoea | 6 (17.6) | 0 (0.0) |
| Back pain | 5 (14.7) | 0 (0.0) |
| Catheter site pain | 5 (14.7) | 0 (0.0) |
| Hyperbilirubinaemia | 5 (14.7) | 2 (5.9) |
| Hypoalbuminaemia | 5 (14.7) | 0 (0.0) |
| Hypogammaglobulinaemia | 5 (14.7) | 1 (2.9) |
| Hypoproteinaemia | 5 (14.7) | 0 (0.0) |
| Pleural effusion | 5 (14.7) | 1 (2.9) |
| Vomiting | 5 (14.7) | 0 (0.0) |
| Asthenia | 4 (11.8) | 1 (2.9) |
| Confusional state | 4 (11.8) | 0 (0.0) |
| Constipation | 4 (11.8) | 0 (0.0) |
| Dizziness | 4 (11.8) | 0 (0.0) |
| Hypertension | 4 (11.8) | 0 (0.0) |
| Hyponatraemia | 4 (11.8) | 2 (5.9) |
| Mucosal dryness | 4 (11.8) | 0 (0.0) |
| Muscle spasms | 4 (11.8) | 0 (0.0) |
| Nausea | 4 (11.8) | 0 (0.0) |
| Night sweats | 4 (11.8) | 0 (0.0) |
| Abdominal pain | 3 (8.8) | 1 (2.9) |
| Ascites | 3 (8.8) | 0 (0.0) |
| Hypercoagulation | 3 (8.8) | 0 (0.0) |
| Hyperhidrosis | 3 (8.8) | 0 (0.0) |
| Hypoglobulinaemia | 3 (8.8) | 0 (0.0) |
| Insomnia | 3 (8.8) | 0 (0.0) |
| Liver disorder | 3 (8.8) | 1 (2.9) |
| Nasopharyngitis | 3 (8.8) | 0 (0.0) |
| Pruritus | 3 (8.8) | 0 (0.0) |

Abbreviations used are:
AE, adverse event;
AP, alkaline phosphatase;
LDH, lactate dehydrogenase;
CRP, C-reactive protein;
ALT, alanine transaminase;
AST, aspartate transaminase;
GGT, gamma-glutamyl transferase;
AE data from the additional treatment cycle of patient 34 not yet included.
As explained above, conventional CD3 binding molecules (e.g. disclosed in WO 99/54440) capable of binding to a context-dependent epitope, though functional, lead to the undesired effect of T cell redistribution in patients causing CNS adverse events. In contrast, binding molecules of the present invention, by binding to the context-independent N-terminal 1-27 amino acids of the CD3 epsilon chain, do not lead to such T cell redistribution effects. As a consequence, the CD3 binding molecules of the invention are associated with a better safety profile compared to conventional CD3 binding molecules.

### 14. Bispecific CD3 Binding Molecules of the Invention Inducing T Cell Mediated Target Cell Lysis by Recognizing a Surface Target Antigen Deplete Target Antigen Positive Cells In Vivo

[0417] A Bispecific CD3 Binding Molecule of the Invention Recognizing CD33 as Target Antigen Depletes CD33-Positive Circulating Monocytes from the Peripheral Blood of Cynomolgus Monkeys

[0418] CD33-AF5 VH-VL×I2C VH-VL (amino acid sequence: SEQ ID NO.267) was produced by expression in CHO cells using the coding nucleotide sequence SEQ ID NO. 268. The coding sequences of (i) an N-terminal immunoglobulin heavy chain leader comprising a start codon embedded within a Kozak consensus sequence and (ii) a C-terminal His₆-tag followed by a stop codon were both attached in frame to the nucleotide sequence SEQ ID NO 268 prior to insertion of the resulting DNA-fragment as obtained by gene synthesis into the multiple cloning site of the expression vector pEF-DHFR (Raum et al. Cancer Immunol Immunother 50 (2001) 141-150). Stable transfection of DHFR-deficient CHO cells, selection for DHFR-positive transfectants secreting the CD3 binding molecule CD33-AF5 VH-VL×I2C VH-VL into the culture supernatant and gene amplification with methotrexat for increasing expression levels were carried out as described (Mack et al. Proc. Natl. Acad. Sci. USA 92 (1995) 7021-7025). Test material for treatment of cynomolgus monkeys was produced in a 20-liter fermenter. Protein purification from the harvest of 3 production runs was based on IMAC affinity chromatography targeting the C-terminal His6-tag of CD33-AF5 VH-VL×I2C VH-VL followed by preparative size exclusion chromatography (SEC). The total yield of final endotoxin-free test material was 60 mg. The analytical SEC-profile of CD33-AF5 VH-VL×I2C VH-VL for use in cynomolgus monkeys revealed that the test material almost exclusively consisted of monomer. The potency of the test material was measured in a cytotoxicity assay as described in example 16.5 using CHO cells transfected with cynomolgus CD33 as target cells and the macaque T cell line 4119LnPx as source of effector cells (FIG. 25). The concentration of CD33-AF5 VH-VL×I2C VH-VL required for half-maximal target cell lysis by the effector T cells (EC50) was determined to be 2.7 ng/ml.

[0419] Young (approx. 3 years old) adult cynomolgus monkeys (Macaca fascicularis) were treated by continuous intravenous infusion of CD3 binding molecule CD33-AF5 VH-VL×I2C VH-VL at different flow-rates (i.e. dose levels) to study depletion of circulating CD33-positive monocytes from the peripheral blood. This situation is equivalent to the treatment with the conventional CD3 binding molecule CD19×CD3 (specific for CD19 on B cells and CD3 on T cells) of those B-NHL patients, who have circulating CD19-positive target B cells (see e.g. WO99/54440). Depletion of circulating CD19-positive target B cells from the peripheral blood had turned out as a valid surrogate for the general clinical efficacy of the conventional CD3 binding molecule (CD19×CD3 as provided in WO99/54440) in patients with CD19-positive B-cell malignomas like B-NHL. Likewise, depletion of circulating CD33-positive monocytes from the peripheral blood is regarded as a valid surrogate of the general clinical efficacy of CD33-directed bispecific CD3 binding molecules of the invention like CD33-AF5 VH-VL×I2C VH-VL in patients with CD33-positive myeloid malignomas like AML (acute myeloid leukemia).

[0420] Continuous infusion was carried out according to the Swivel method as follows: The monkeys are catheterized via the vena femoralis into the vena cava caudalis using a vein catheter. The catheter is tunneled subcutaneously to the dorsal shoulder region and exteriorized at the caudal scapula. Then a tube is passed through a jacket and a protection spring. The jacket is fastened around the animal and the catheter, via the tube, is connected to an infusion pump.

[0421] Administration solution (1.25 M lysine, 0.1% tween 80, pH 7) without test material was infused continuously at 48 ml/24 h for 7 days prior to treatment start to allow acclimatization of the animals to the infusion conditions. Treatment was started by adding CD33-AF5 VH-VL×I2C VH-VL test material to the administration solution at the amount required for each individual dose level to be tested (i.e. flow rate of CD33-AF5 VH-VL×I2C VH-VL). The infusion reservoir was changed every day throughout the whole acclimatization and treatment phase. Planned treatment duration was 7 days except for the 120 μg/m²/24 h dose level, where animals received 14 days of treatment.

[0422] Time courses of absolute counts in circulating T cells and CD33-positive monocytes were determined by 4- or 3-colour FACS analysis, respectively:

### Collection of Blood Samples and Routine Analysis

[0423] Blood samples (1 ml) were obtained before and 0.75, 2, 6, 12, 24, 30, 48, 72 hours after start of continuous infusion with MCSP-G4 VH-VL×I2C VH-VL as well as after 7 and 14 days (and after 9 days at the 120 μg/m²/24 h dose level) of treatment using EDTA-containing Vacutainer™ tubes (Becton Dickinson) which were shipped for analysis at 4° C. In some cases slight variations of these time points occurred for operational reasons. FACS analysis of lymphocyte subpopulations was performed within 24-48 h after blood sample collection. Absolute numbers of leukocyte subpopulations in the blood samples were determined through differential blood analysis in a routine veterinary lab.

Isolation of PBMC from Blood Samples

[0424] PBMC (peripheral blood mononuclear cells) isolation was performed by an adapted Ficoll™ gradient separation protocol. Blood was transferred at room temperature into 5 ml Falcon™ tubes pre-loaded with 1 ml Biocoll™ solution (Biochrom). Centrifugation was carried out in a swing-out rotor for 15 min at 1700×g and 22° C. without deceleration. The PBMC above the Biocoll™ layer were isolated, washed once with FACS buffer (PBS/2% FBS [Foetal Bovine Serum; Biochrom]), centrifuged and resuspended in FACS buffer. Centrifugation during all wash steps was carried out in a swing-out rotor for 4 min at 800×g and 4° C. If necessary, lysis of erythrocytes was performed by incubating the isolated PBMC in 3 ml erythrocyte lysis buffer (8.29 g NH₄Cl, 1.00 g KHCO₃, 0.037 g EDTA, ad 1.0 l H₂O_{bidest}, pH 7.5) for 5 min at room temperature followed by a washing step with FACS buffer.

Staining of PBMC with Fluorescence-Labeled Antibodies Against Cell Surface Molecules

[0425] Monoclonal antibodies reactive with cynomolgus antigens were obtained from Becton Dickinson (¹Cat. No. 345784, ²Cat. No. 556647, ³Cat. No. 552851, ⁶Cat. No. 557710), Beckman Coulter (⁴Cat. No. IM2470) and Miltenyi (⁵Cat. No. 130-091-732) and used according to the manufacturers' recommendations. 5×10⁵-1×10⁶ cells were stained with the following antibody combinations: anti-CD14¹ (FITC)×anti-CD56² (PE)×anti-CD3³ (PerCP)×anti-CD19⁴ (APC) and anti-CD14¹ (FITC)×anti-CD33⁵ (PE)×anti-CD16⁶ (Alexa Fluor 647™). Cells were pelleted in V-shaped 96 well multititer plates (Greiner) and the supernatant was removed. Cell pellets were resuspended in a total volume of 100 μl containing the specific antibodies diluted in FACS buffer. Incubation was carried out in the dark for 30 min at 4° C. Subsequently, samples were washed twice with FACS buffer and cell pellets were resuspended in FACS buffer for flowcytometric analysis.

### Flowcytometric Detection of Stained Lymphocytes by FACS

[0426] Data collection was performed with a 4 color BD FACSCalibur™ (Becton Dickinson). For each measurement 1×10⁴ cells of defined lymphocyte subpopulations were acquired. Statistical analysis was performed with the program CellQuest Pro™ (Becton Dickinson) to obtain lymphocyte subpopulation percentages and to classify cell surface molecule expression intensity. Subsequently, percentages of single lymphocyte subsets related to total lymphocytes (i.e. B plus T plus NK cells excluding myeloid cells via CD14-staining) as determined by FACS were correlated with the lymphocyte count from the differential blood analysis to calculate absolute cell numbers of T cells (CD3⁺, CD56⁻, CD14⁻). Absolute numbers of CD33-positive monocytes were calculated by multiplying the monocyte counts from the differential blood analysis with the corresponding ratios of CD33-positive monocytes (CD33⁺, CD14⁺) to all monocytes (CD14⁺) as determined by FACS.

[0427] The percentage compared to baseline (i.e. 100%) of absolute circulating CD33-positive monocyte counts at the end of treatment with CD33-AF5 VH-VL×I2C VH-VL in 4 cohorts of 2 cynomolgus monkeys with inter-cohort dose escalation from 30 over 60 and 240 to 1000 μg/m²/24 h are shown in FIG. 26 A.

[0428] As shown in FIG. 26 A, continuous intravenous infusion of CD33-AF5 VH-VL×I2C VH-VL induces depletion of circulating CD33-positive monocytes in a dose-dependent manner. While there was still no detectable depletion of circulating CD33-positive monocytes at 30 μg/m²/24 h, a first trend towards a reduction of CD33-positive monocyte counts became visible at 60 μg/m²/24 h after 7 days of treatment. At 240 μg/m²/24 h circulating CD33-positive monocytes were almost completely depleted from the peripheral blood after 3 days of treatment. This was reached even faster at 1000 μg/m²/24 h, where depletion of the circulating CD33-positive monocytes from the peripheral blood was completed already after 1 day of treatment. This finding was confirmed by the results shown in FIG. 26 B demonstrating depletion of circulating CD33-positive monocytes by two thirds and 50% compared to the respective baseline in two cynomolgus monkeys treated by continuous infusion with CD33-AF5 VH-VL×I2C VH-VL at 120 μg/m²/24 h for 14 days.

[0429] This outcome is a clear signal clinical efficacy of the CD3 binding molecules of the invention in general and of bispecific CD33-directed CD3 binding molecules of the invention for the treatment of CD33-positive malignomas like AML in particularly. Moreover, the T cell redistribution during the starting phase of treatment with CD33-AF5 VH-VL×I2C VH-VL in the presence of circulating target cells (i.e. CD33-positive monocytes) seems to be less pronounced than T cell redistribution during the starting phase of treatment with conventional CD19×CD3 constructs, as described in WO99/54440 in B-NHL patients with a significant number of circulating target cells (i.e. CD19-positive B cells) as shown in FIG. 22. While T cells disappear completely from the circulation upon start of CD19×CD3 infusion and do not reappear until the circulating CD19-positive target B cells are depleted from the peripheral blood (FIG. 22), initial disappearance of circulating T cells is incomplete upon infusion start with CD33-AF5 VH-VL×I2C VH-VL and T cell counts recover still during the presence of circulating CD33-positive target cells (FIG. 26 B). This confirms that CD3 binding molecules of the invention (directed against and generated against an epitope of human and non-chimpanzee primates CD3ε (epsilon) chain and being a part or fragment or the full length of the amino acid sequence as provided in SEQ ID Nos. 2, 4, 6, or 8) by recognizing a context-independent CD3 epitope show a more favorable T cell redistribution profile than conventional CD3 binding molecules recognizing a context-dependent CD3 epitope, like the binding molecules provided in WO99/54440.

### 15. CD3 Binding Molecules of the Invention Directed at Essentially Context Independent CD3 Epitopes by Inducing Less Redistribution of Circulating T Cells in the Absence of Circulating Target Cells Reduce the Risk of Adverse Events Related to the Initiation of Treatment

[0430] Reduced T Cell Redistribution in Cynomolgus Monkeys Following Initiation of Treatment with a Representative Cross-Species Specific CD3 Binding Molecule of the Invention

[0431] MCSP-G4 VH-VL×I2C VH-VL (amino acid sequence: SEQ ID NO. 193) was produced by expression in CHO cells using the coding nucleotide sequence SEQ ID NO. 194. The coding sequences of (i) an N-terminal immunoglobulin heavy chain leader comprising a start codon embedded within a Kozak consensus sequence and (ii) a C-terminal His6-tag followed by a stop codon were both attached in frame to the nucleotide sequence SEQ ID NO. 194 prior to insertion of the resulting DNA-fragment as obtained by gene synthesis into the multiple cloning site of the expression vector pEF-DHFR (Raum et al. Cancer Immunol Immunother 50 (2001) 141-150). Stable transfection of DHFR-deficient CHO cells, selection for DHFR-positive transfectants secreting the CD3 binding molecule MCSP-G4 VH-VL×I2C VH-VL into the culture supernatant and gene amplification with methotrexat for increasing expression levels were carried out as described (Mack et al. Proc. Natl. Acad. Sci. USA 92 (1995) 7021-7025). Test material for treatment of cynomolgus monkeys was produced in a 200-liter fermenter. Protein purification from the harvest was based on IMAC affinity chromatography targeting the C-terminal His6-tag of MCSP-G4 VH-VL×I2C VH-VL followed by preparative size exclusion chromatography (SEC). The total yield of final endotoxin-free test material was 40 mg. The test material consisted of 70% monomer, 30% dimer and a small contamination of higher multimer. The potency of the test material was measured in a cytotoxicity assay as described in example 11 using CHO cells transfected with cynomolgus MCSP as target cells and the macaque T cell line 4119LnPx as source of effector cells (FIG. 27). The concentration of MCSP-G4 VH-VL×I2C VH-VL required for half-maximal target cell lysis by the effector T cells (EC50) was determined to be 1.9 ng/ml.

[0432] Young (approx. 3 years old) adult cynomolgus monkeys (Macaca fascicularis) were treated by continuous intravenous infusion of CD3 binding molecule MCSP-G4 VH-VL×I2C VH-VL at different flow-rates (i.e. dose levels) to study redistribution of circulating T cells following initiation of treatment in the absence of circulating target cells. Although the CD3 binding molecule MCSP-G4 VH-VL×I2C VH-VL can recognize both cynomolgus MCSP and cynomolgus CD3, there are no circulating blood cells expressing MCSP. Therefore, the only interaction possible in the circulating blood is binding of the CD3-specific arm of MCSP-G4 VH-VL×I2C VH-VL to CD3 on T cells. This situation is equivalent to the treatment with the conventional CD3 binding molecule (CD19×CD3 binding molecule specific for CD19 on B cells and CD3 on T cells) of those B-NHL patients, who have no circulating CD19-positive target B cells as described in example 13.

[0433] Continuous infusion was carried out according to the Swivel method as follows: The monkeys are catheterized via the vena femoralis into the vena cava caudalis using a vein catheter. The catheter is tunneled subcutaneously to the dorsal shoulder region and exteriorized at the caudal scapula. Then a tube is passed through a jacket and a protection spring. The jacket is fastened around the animal and the catheter, via the tube, is connected to an infusion pump.

[0434] Administration solution (1.25 M lysine, 0.1% tween 80, pH 7) without test material was infused continuously at 48 ml/24 h for 7 days prior to treatment start to allow acclimatization of the animals to the infusion conditions. Treatment was started by adding MCSP-G4 VH-VL×I2C VH-VL test material to the administration solution at the amount required for each individual dose level to be tested (i.e. flow rate of MCSP-G4 VH-VL×I2C VH-VL). The infusion reservoir was changed every day throughout the whole acclimatization and treatment phase. Treatment duration was 7 days.

[0435] Time courses of absolute T-cell counts in peripheral blood were determined by four color FACS analysis as follows:

### Collection of Blood Samples and Routine Analysis

[0436] Blood samples (1 ml) were obtained before and 0.75, 2, 6, 12, 24, 30, 48, 72 hours after start of continuous infusion with MCSP-G4 VH-VL×I2C VH-VL as well as after 7 days of treatment using EDTA-containing Vacutainer™ tubes (Becton Dickinson) which were shipped for analysis at 4° C. In some cases slight variations of these time points occurred for operational reasons. FACS analysis of lymphocyte subpopulations was performed within 24-48 h after blood sample collection. Absolute numbers of leukocyte subpopulations in the blood samples were determined through differential blood analysis in a routine veterinary lab.

Isolation of PBMC from Blood Samples

[0437] PBMC (peripheral blood mononuclear cells) isolation was performed by an adapted Ficoll™ gradient separation protocol. Blood was transferred at room temperature into 5 ml Falcon™ tubes pre-loaded with 1 ml Biocoll™ solution (Biochrom). Centrifugation was carried out in a swing-out rotor for 15 min at 1700×g and 22° C. without deceleration. The PBMC above the Biocoll™ layer were isolated, washed once with FACS buffer (PBS/2% FBS [Foetal Bovine Serum; Biochrom]), centrifuged and resuspended in FACS buffer. Centrifugation during all wash steps was carried out in a swing-out rotor for 4 min at 800×g and 4° C. If necessary, lysis of erythrocytes was performed by incubating the isolated PBMC in 3 ml erythrocyte lysis buffer (8.29 g NH₄Cl, 1.00 g KHCO₃, 0.037 g EDTA, ad 1.0 l H₂O_{bidest}, pH 7.5) for 5 min at room temperature followed by a washing step with FACS buffer.

Staining of PBMC with Fluorescence-Labeled Antibodies Against Cell Surface Molecules

[0438] Monoclonal antibodies reactive with cynomolgus antigens were obtained from Becton Dickinson (¹Cat. No. 345784, ²Cat. No. 556647, ³Cat. No. 552851) and Beckman Coulter (⁴Cat. No. IM2470) used according to the manufacturers' recommendations. 5×10⁵-1×10⁶ cells were stained with the following antibody combination: anti-CD14¹ (FITC)×anti-CD56² (PE)×anti-CD3³ (PerCP)×anti-CD19⁴ (APC). Cells were pelleted in V-shaped 96 well multititer plates (Greiner) and the supernatant was removed. Cell pellets were resuspended in a total volume of 100 μl containing the specific antibodies diluted in FACS buffer. Incubation was carried out in the dark for 30 min at 4° C. Subsequently, samples were washed twice with FACS buffer and cell pellets were resuspended in FACS buffer for flowcytometric analysis.

### Flowcytometric Detection of Stained Lymphocytes by FACS

[0439] Data collection was performed with a 4 color BD FACSCalibur™ (Becton Dickinson). For each measurement 1×10⁴ cells of defined lymphocyte subpopulations were acquired. Statistical analysis was performed with the program CellQuest Pro™ (Becton Dickinson) to obtain lymphocyte subpopulation percentages and to classify cell surface molecule expression intensity. Subsequently, percentages of single lymphocyte subsets related to total lymphocytes (i.e. B plus T plus NK cells excluding myeloid cells via CD14-staining) as determined by FACS were correlated with the lymphocyte count from the differential blood analysis to calculate absolute cell numbers of T cells (CD3⁺, CD56⁻, CD14⁻).

[0440] T cell redistribution during the starting phase of treatment with MCSP-G4 VH-VL×I2C VH-VL in cynomolgus monkeys at dose levels of 60, 240 and 1000 μg/m²/24 h is shown in FIG. 28. These animals showed no signs at all of any T cell redistribution during the starting phase of treatment, i.e. T cell counts rather increased than decreased upon treatment initiation. Given that T cell redistribution is consistently observed in 100% of all patients without circulating target cells, upon treatment initiation with the conventional CD3 binding molecule (e.g. CD19×CD3 construct as described in WO 99/54440) against a context dependent CD3 epitope, it was demonstrated that substantially less T cell redistribution in the absence of circulating target cells upon treatment initiation can be observed with a CD3 binding molecule of the invention directed and generated against an epitope of human an non-chimpanzee primate CD3 epsilon chain as defined by the amino acid sequence of anyone of SEQ ID NOs: 2, 4, 6, or 8 or a fragment thereof. This is in clear contrast to CD3-binding molecules directed against a context-dependent CD3 epitope, like the constructs described in WO 99/54440, The binding molecules against context-independent CD3 epitopes, as (inter alia) provided in any one of SEQ ID NOs: 2, 4, 6, or 8 (or fragments of these sequences) provide for this substantially less (detrimental and non-desired) T cell redistribution. Because T cell redistribution during the starting phase of treatment with CD3 binding molecules is a major risk factor for CNS adverse events, the CD3 binding molecules provided herein and capable of recognizing a context independent CD3 epitope have a substantial advantage over the CD3 binding molecules known in the art and directed against context-dependent CD3 epitopes. Indeed none of the cynomolgus monkeys treated with MCSP-G4 VH-VL×I2C VH-VL showed any signs of CNS symptoms.

[0441] The context-independence of the CD3 epitope is provided in this invention and corresponds to the first 27 N-terminal amino acids of CD3 epsilon) or fragments of this 27 amino acid stretch. This context-independent epitope is taken out of its native environment within the CD3 complex and fused to heterologous amino acid sequences without loss of its structural integrity. Anti-CD3 binding molecules as provided herein and generated (and directed) against a context-independent CD3 epitope provide for a surprising clinical improvement with regard to T cell redistribution and, thus, a more favorable safety profile. Without being bound by theory, since their CD3 epitope is context-independent, forming an autonomous selfsufficient subdomain without much influence on the rest of the CD3 complex, the CD3 binding molecules provided herein induce less allosteric changes in CD3 conformation than the conventional CD3 binding molecules (like molecules provided in WO 99/54440), which recognize context-dependent CD3 epitopes like molecules provided in WO 99/54440. As a consequence (again without being bound by theory), the induction of intracellular NcK2 recruitment by the CD3 binding molecules provided herein is also reduced resulting in less isoform switch of T cell integrins and less adhesion of T cells to endothelial cells. It is preferred that preparations of CD3 binding molecules of the invention (directed against and generated against a context-independent epitope as defined herein) essentially consists of monomeric molecules. These monomeric molecules are even more efficient (than dimeric or multimeric molecules) in avoiding T cell redistribution and thus the risk of CNS adverse events during the starting phase of treatment.

### 16. Generation and Characterization of CD33 and CD3 Cross-Species Specific Bispecific Single Chain Molecules

### 16.1. Generation of CHO Cells Expressing Human CD33

[0442] The coding sequence of human CD33 as published in GenBank (Accession number NM_{—}001772) was obtained by gene synthesis according to standard protocols. The gene synthesis fragment was designed as to contain first a Kozak site for eukaryotic expression of the construct, followed by a 19 amino acid immunoglobulin leader peptide, followed in frame by the coding sequence of the mature human CD33 protein, followed in frame by the coding sequence of serine glycine dipeptide, a histidine₆-tag and a stop codon (the cDNA and amino acid sequence of the construct is listed under SEQ ID Nos 305 and 306). The gene synthesis fragment was also designed as to introduce restriction sites at the beginning and at the end of the fragment. The introduced restriction sites, EcoRI at the 5′ end and SalI at the 3′ end, were utilised in the following cloning procedures. The gene synthesis fragment was cloned via EcoRI and SalI into a plasmid designated pEF-DHFR (pEF-DHFR is described in Raum et al. Cancer Immunol Immunother 50 (2001) 141-150) following standard protocols. The aforementioned procedures were carried out according to standard protocols (Sambrook, Molecular Cloning; A Laboratory Manual, 3rd edition, Cold Spring Harbour Laboratory Press, Cold Spring Harbour, N.Y. (2001)). A clone with sequence-verified nucleotide sequence was transfected into DHFR deficient CHO cells for eukaryotic expression of the construct. Eukaryotic protein expression in DHFR deficient CHO cells was performed as described by Kaufmann R. J. (1990) Methods Enzymol. 185, 537-566. Gene amplification of the construct was induced by increasing concentrations of methothrexate (MTX) to a final concentration of up to 20 nM MTX.

### 16.2. Generation of CHO Cells Expressing the Extracellular Domain of Macaque CD33

[0443] The cDNA sequence of macaque CD33 was obtained by a set of 3 PCRs on cDNA from macaque monkey bone marrow prepared according to standard protocols. The following reaction conditions: 1 cycle at 94° C. for 3 minutes followed by 35 cycles with 94° C. for 1 minute, 53° C. for 1 minute and 72° C. for 2 minutes followed by a terminal cycle of 72° C. for 3 minutes and the following primers were used:

1. forward primer:

(SEQ ID No. 369)

5′-gaggaattcaccatgccgctgctgctactgctgcccctgctgtgg
gcaggggccctggctatgg-3′
reverse primer:

(SEQ ID No. 370)

5′-gatttgtaactgtatttggtacttcc-3′
2. forward primer:

(SEQ ID No. 371)

5′-attccgcctccttggggatcc-3′
reverse primer:

(SEQ ID No. 372)

5′-gcataggagacattgagctggatgg-3′
3. forward primer:

(SEQ ID No. 373)

5′-gcaccaacctgacctgtcagg-3′
reverse primer:

(SEQ ID No. 374)

5′-agtgggtcgactcactgggtcctgacctctgagtattcg-3′

[0444] Those PCRs generate three overlapping fragments, which were isolated and sequenced according to standard protocols using the PCR primers, and thereby provided a portion of the cDNA sequence of macaque CD33 from the second nucleotide of codon +2 to the third nucleotide of codon +340 of the mature protein. To generate a construct for expression of macaque CD33 a cDNA fragment was obtained by gene synthesis according to standard protocols (the cDNA and amino acid sequence of the construct is listed under SEQ ID Nos 307 and 308). In this construct the coding sequence of macaque CD33 from amino acid+3 to +340 of the mature CD33 protein was fused into the coding sequence of human CD33 replacing the human coding sequence of the amino acids +3 to +340. The gene synthesis fragment was also designed as to contain a Kozak site for eukaryotic expression of the construct and restriction sites at the beginning and the end of the fragment containing the cDNA coding for essentially the whole extracellular domain of macaque CD33, the macaque CD33 transmembrane domain and a macaque-human chimeric intracellular CD33 domain. The introduced restriction sites XbaI at the 5′ end and SalI at the 3′ end, were utilised in the following cloning procedures. The gene synthesis fragment was then cloned via XbaI and SalI into a plasmid designated pEF-DHFR (pEF-DHFR is described in Raum et al. Cancer Immunol Immunother 50 (2001) 141-150). A sequence verified clone of this plasmid was used to transfect CHO/dhfr-cells as described above.

### 16.3. Generation of CD33 and CD3 Cross-Species Specific Bispecific Antibody Molecules

### Cloning of Cross-Species Specific Binding Molecules

[0445] Generally, bispecific antibody molecules, each comprising a domain with a binding specificity cross-species specific for human and non-chimpanzee primate CD3 epsilon as well as a domain with a binding specificity cross-species specific for human and non-chimpanzee primate CD33, were designed as set out in the following Table 5:

TABLE 5
Formats of anti-CD3 and anti-CD33 cross-species specific bispecific
molecules

| SEQ ID | Formats of protein constructs |
|---|---|
| (nucl/prot) | (N → C) |
| 276/275 | AH11HL × H2CHL |
| 258/257 | AH3HL × H2CHL |
| 270/269 | AC8HL × H2CHL |
| 264/263 | AF5HL × H2CHL |
| 288/287 | F2HL × H2CHL |
| 300/299 | E11HL × H2CHL |
| 282/281 | B3HL × H2CHL |
| 294/293 | B10HL × H2CHL |
| 278/277 | AH11HL × F12QHL |
| 260/259 | AH3HL × F12QHL |
| 272/271 | AC8HL × F12QHL |
| 266/265 | AF5HL × F12QHL |
| 290/289 | F2HL × F12QHL |
| 302/301 | E11HL × F12QHL |
| 284/283 | B3HL × F12QHL |
| 296/295 | B10HL × F12QHL |
| 280/279 | AH11HL × I2CHL |
| 262/261 | AH3HL × I2CHL |
| 274/273 | AC8HL × I2CHL |
| 268/267 | AF5HL × I2CHL |
| 292/291 | F2HL × I2CHL |
| 304/303 | E11HL × I2CHL |
| 286/285 | B3HL × I2CHL |
| 298/297 | B10HL × I2CHL |

[0446] The aforementioned constructs containing the variable light-chain (L) and variable heavy-chain (H) domains cross-species specific for human and macaque CD33 and the CD3 specific VH and VL combinations cross-species specific for human and macaque CD3 were obtained by gene synthesis. The gene synthesis fragments were designed as to contain first a Kozak site for eukaryotic expression of the construct, followed by a 19 amino acid immunoglobulin leader peptide, followed in frame by the coding sequence of the respective bispecific antibody molecule, followed in frame by the coding sequence of a histidine₆-tag and a stop codon. The gene synthesis fragment was also designed as to introduce suitable restriction sites at the beginning and at the end of the fragment. The introduced restriction sites were utilized in the following cloning procedures. The gene synthesis fragment was cloned via these restriction sites into a plasmid designated pEF-DHFR (pEF-DHFR is described in Raum et al. Cancer Immunol Immunother 50 (2001) 141-150) following standard protocols. The aforementioned procedures were carried out according to standard protocols (Sambrook, Molecular Cloning; A Laboratory Manual, 3rd edition, Cold Spring Harbour Laboratory Press, Cold Spring Harbour, N.Y. (2001)). A clone with sequence-verified nucleotide sequence was transfected into DHFR deficient CHO cells for eukaryotic expression of the construct. Eukaryotic protein expression in DHFR deficient CHO cells was performed as described by Kaufmann R. J. (1990) Methods Enzymol. 185, 537-566. Gene amplification of the construct was induced by increasing concentrations of methothrexate (MTX) to a final concentration of up to 20 nM MTX.

### Expression and Purification of the Bispecific Antibody Molecules

[0447] The bispecific antibody molecules are expressed in Chinese hamster ovary cells (CHO). Eukaryotic protein expression in DHFR deficient CHO cells was performed as described by Kaufmann R. J. (1990) Methods Enzymol. 185, 537-566. Gene amplification of the constructs was induced by addition of increasing concentrations of MTX up to final concentrations of 20 nM MTX. After two passages of stationary culture the cells were grown in roller bottles with nucleoside-free HyQ PF CHO liquid soy medium (with 4.0 mM L-Glutamine with 0.1% Pluronic F-68; HyClone) for 7 days before harvest. The cells were removed by centrifugation and the supernatant containing the expressed protein was stored at −20° C. Alternatively, constructs were transiently expressed in HEK 293 cells. Transfection was performed with 293fectin reagent (Invitrogen, #12347-019) according to the manufacturer's protocol.

[0448] Äkta® Explorer System (GE Health Systems) and Unicorn® Software were used for chromatography. Immobilized metal affinity chromatography (“IMAC”) was performed using a Fractogel EMD chelate® (Merck) which was loaded with ZnCl₂ according to the protocol provided by the manufacturer. The column was equilibrated with buffer A (20 mM sodium phosphate buffer pH 7.2, 0.1 M NaCl) and the cell culture supernatant (500 ml) was applied to the column (10 ml) at a flow rate of 3 ml/min. The column was washed with buffer A to remove unbound sample. Bound protein was eluted using a two step gradient of buffer B (20 mM sodium phosphate buffer pH 7.2, 0.1 M NaCl, 0.5 M Imidazole) according to the following:

Step 1: 20% buffer B in 6 column volumes
Step 2: 100% buffer B in 6 column volumes

[0449] Eluted protein fractions from step 2 were pooled for further purification. All chemicals were of research grade and purchased from Sigma (Deisenhofen) or Merck (Darmstadt).

[0450] Gel filtration chromatography was performed on a HiLoad 16/60 Superdex 200 prep grade column (GE/Amersham) equilibrated with Equi-buffer (25 mM Citrate, 200 mM Lysine, 5% Glycerol, pH 7.2). Eluted protein samples (flow rate 1 ml/min) were subjected to standard SDS-PAGE and Western Blot for detection. Prior to purification, the column was calibrated for molecular weight determination (molecular weight marker kit, Sigma MW GF-200). Protein concentrations were determined using OD280 nm.

[0451] Purified bispecific antibody protein was analyzed in SDS PAGE under reducing conditions performed with pre-cast 4-12% Bis Tris gels (Invitrogen). Sample preparation and application were performed according to the protocol provided by the manufacturer. The molecular weight was determined with MultiMark protein standard (Invitrogen). The gel was stained with colloidal Coomassie (Invitrogen protocol). The purity of the isolated protein is >95% as determined by SDS-PAGE.

[0452] The bispecific antibody has a molecular weight of about 52 kDa under native conditions as determined by gel filtration in PBS. All constructs were purified according to this method.

[0453] Western Blot was performed using an Optitran® BA-S83 membrane and the Invitrogen Blot Module according to the protocol provided by the manufacturer. For detection of the bispecific antibody protein antibodies an anti-His Tag antibody was used (Penta His, Qiagen). A Goat-anti-mouse Ig antibody labeled with alkaline phosphatase (AP) (Sigma) was used as secondary antibody and BCIP/NBT (Sigma) as substrate. A single band was detected at 52 kD corresponding to the purified bispecific antibody.

### 16.4. Flow Cytometric Binding Analysis of the CD33 and CD3 Cross-Species Specific Bispecific Antibodies

[0454] In order to test the functionality of the cross-species specific bispecific antibody constructs regarding the capability to bind to human and macaque CD33 and CD3, respectively, a FACS analysis was performed. For this purpose CHO cells transfected with human CD33 as described in Example 16.1 and the human CD3 positive T cell leukemia cell line HPB-ALL (DSMZ, Braunschweig, ACC483) were used to test the binding to human antigens. The binding reactivity to macaque antigens was tested by using the generated macaque CD33 transfectant described in Example 16.2 and macaque PBMC (preparation of macaque PBMC was performed by Ficoll gradient centrifugation of peripheral blood from macaque monkeys according to standard protocolls). 200.000 cells of the respective cell lines of PBMC were incubated for 30 min. on ice with 50 μl of the purified protein of the cross-species specific bispecific antibody constructs (5 μg/ml) or cell culture supernatant of transfected cells expressing the cross-species specific bispecific antibody constructs. The cells were washed twice in PBS with 2% FCS and binding of the construct was detected with a murine anti-His antibody (Penta His antibody; Qiagen; diluted 1:20 in 50 μl PBS with 2% FCS). After washing, bound anti-His antibodies were detected with an Fc gamma-specific antibody (Dianova) conjugated to phycoerythrin, diluted 1:100 in PBS with 2% FCS. Supernatant of untransfected CHO cells was used as negative control.

[0455] Flow cytometry was performed on a FACS-Calibur apparatus; the CellQuest software was used to acquire and analyze the data (Becton Dickinson biosciences, Heidelberg). FACS staining and measuring of the fluorescence intensity were performed as described in Current Protocols in Immunology (Coligan, Kruisbeek, Margulies, Shevach and Strober, Wiley-Interscience, 2002).

[0456] The specific binding of human and non-chimpanzee primate CD3 of the CD3 binding molecules of the invention was clearly detectable as shown in FIG. 29. In the FACS analysis all constructs show binding to CD3 and CD33 as compared to the respective negative controls. Cross-species specificity of the bispecific antibodies to human and macaque CD3 and CD33 antigens is demonstrated.

### 16.5. Bioactivity of CD33 and CD3 Cross-Species Specific Bispecific Antibodies

[0457] Bioactivity of the generated bispecific antibodies was analyzed by chromium 51 (⁵¹Cr) release in vitro cytotoxicity assays using the CD33 positive cell lines described in Examples 16.1 and 16.2. As effector cells stimulated human CD4/CD56 depleted PBMC or the macaque T cell line 4119LnPx were used as specified in the respective figures.

[0458] Generation of stimulated human PBMC was performed as follows:

A Petri dish (85 mm diameter, Nunc) was coated with a commercially available anti-CD3 specific antibody (e.g. OKT3, Othoclone) in a final concentration of 1 μg/ml for 1 hour at 37° C. Unbound protein was removed by one washing step with PBS. The fresh PBMC were isolated from peripheral blood (30-50 ml human blood) by Ficoll gradient centrifugation according to standard protocols. 3-5×10⁷ PBMC were added to the precoated petri dish in 50 ml of RPMI 1640 with stabilized glutamine/10% FCS/IL-2 20 U/ml (Proleukin, Chiron) and stimulated for 2 days. On the third day the cells were collected and washed once with RPMI 1640. IL-2 was added to a final concentration of 20 U/ml and the cells were cultivated again for one day in the same cell culture medium as above.

[0459] Target cells were washed twice with PBS and labeled with 11.1 MBq ⁵¹Cr in a final volume of 100 μl RPMI with 50% FCS for 45 minutes at 37° C. Subsequently the labeled target cells were washed 3 times with 5 ml RPMI and then used in the cytotoxicity assay. The assay was performed in a 96 well plate in a total volume of 250 μl supplemented RPMI (as above) with an E:T ratio of 10:1. 1 μg/ml of the cross-species specific bispecific antibody molecules and 20 threefold dilutions thereof were applied. The assay time was 18 hours and cytotoxicity was measured as relative values of released chromium in the supernatant related to the difference of maximum lysis (addition of Triton-X) and spontaneous lysis (without effector cells). All measurements were done in quadruplicates. Measurement of chromium activity in the supernatants was performed with a Wizard 3″ gamma counter (Perkin Elmer Life Sciences GmbH, Köln, Germany). Analysis of the experimental data was performed with Prism 4 for Windows (version 4.02, GraphPad Software Inc., San Diego, Calif., USA). Sigmoidal dose response curves typically have R² values >0.90 as determined by the software. EC₅₀ values calculated by the analysis program were used for comparison of bioactivity.

[0460] As shown in FIG. 30, all of the generated cross-species specific bispecific constructs demonstrate cytotoxic activity against human CD33 positive target cells elicited by stimulated human CD4/CD56 depleted PBMC and against macaque CD33 positive target cells elicited by the macaque T cell line 4119LnPx.

### 17. Purification of Cross-Species Specific Bispecific Single chain Molecules by an Affinity Procedure Based on the Context Independent CD3 Epsilon Epitope Corresponding to the N-Terminal Amino Acids 1-27

### 17.1 Generation of an Affinity Column Displaying the Isolated Context Independent Human CD3 Epsilon Epitope Corresponding to the N-Terminal Amino Acids 1-27

[0461] The plasmid for expression of the construct 1-27 CD3-Fc consisting of the 1-27 N-terminal amino acids of the human CD3 epsilon chain fused to the hinge and Fc gamma region of human immunoglobulin IgG1 described above (Example 3; cDNA sequence and amino acid sequence of the recombinant fusion protein are listed under SEQ ID NOs 230 and 229) was transfected into DHFR deficient CHO cells for eukaryotic expression of the construct. Eukaryotic protein expression in DHFR deficient CHO cells was performed as described by Kaufmann R. J. (1990) Methods Enzymol. 185, 537-566. Gene amplification of the construct was induced by increasing concentrations of methotrexate (MTX) to a final concentration of up to 20 nM MTX. After two passages of stationary culture the cells were grown in roller bottles with nucleoside-free HyQ PF CHO liquid soy medium (with 4.0 mM L-Glutamine with 0.1% Pluronic F-68; HyClone) for 7 days before harvest. The cells were removed by centrifugation and the supernatant containing the expressed protein was stored at −20° C. For the isolation of the fusion protein a goat anti-human fc affinity column was prepared according to standard protocols using a commercially available affinity purified goat anti-human IgG fc fragment specific antibody with minimal cross-reaction to bovine, horse, and mouse serum proteins (Jackson ImmunoResearch Europe Ltd.). Using this affinity column the fusion protein was isolated out of cell culture supernatant on an Äkta Explorer System (GE Amersham) and eluted by citric acid. The eluate was neutralized and concentrated. After dialysis against amine free coupling buffer the purified fusion protein was coupled to an N-Hydroxy-Succinimide NHS activated 1 ml HiTrap column (GE Amersham).

[0462] After coupling remaining NHS groups were blocked and the column was washed and stored at 5° C. in storage buffer containing 0.1% sodium azide.

### 17.2 Purification of Cross-Species Specific Bispecific Single Chain Molecules Using a Human CD3 Peptide Affinity Column

[0463] 200 ml cell culture supernatant of cells expressing cross-species specific bispecific single chain molecules were 0.2 μm sterile filtered and applied to the CD3 peptide affinity column using an Äkta Explorer system (GE Amersham).

[0464] The column was then washed with phosphate buffered saline PBS pH 7.4 to wash out unbound sample. Elution was done with an acidic buffer pH 3.0 containing 20 mM Citric acid and 1 M sodium chloride. Eluted protein was neutralized immediately by 1 M Trishydroxymethylamine TRIS pH 8.3 contained in the collection tubes of the fraction collector.

[0465] Protein analysis was done by SDS PAGE and Western Blot.

[0466] For SDS PAGE BisTris Gels 4-12% are used (Invitrogen). The running buffer was 1×MES-SDS-Puffer (Invitrogen). As protein standard 15 μl prestained Sharp Protein Standard (Invitrogen) was applied. Electrophoresis was performed for 60 minutes at 200 volts 120 mA max. Gels were washed in demineralised water and stained with Coomassie for one hour. Gels are destained in demineralised water for 3 hours. Pictures are taken with a Syngene Gel documentation system.

[0467] For Western Blot a double of the SDS PAGE gel was generated and proteins were electroblotted onto a nitrocellulose membrane. The membrane was blocked with 2% bovine serum albumin in PBS and incubated with a biotinylated murine Penta His antibody (Qiagen). As secondary reagent a streptavidin alkaline phosphatase conjugate (DAKO) was used. Blots were developed with BCIP/NBT substrate solution (Pierce).

[0468] As demonstrated in FIGS. 31, 32 and 33 the use of a human CD3 peptide affinity column as described above allows the highly efficient purification of the bispecific single chain molecules from cell culture supernatant. The cross-species specific anti-CD3 single chain antibodies contained in the bispecific single chain molecules therefore enable via their specific binding properties an efficient generic one-step method of purification for the cross-species specific bispecific single chain molecules, without the need of any tags solely attached for purification purposes.

### 18. Generic Pharmacokinetic Assay for Cross-Species Specific Bispecific Single Chain Molecules

### 18.1 Production of 1-27 CD3-Fc for Use in the Pharmacokinetic Assay

[0469] The coding sequence of the 1-27 N-terminal amino acids of the human CD3 epsilon chain fused to the hinge and Fc gamma region of human immunoglobulin IgG1 was obtained by gene synthesis according to standard protocols (cDNA sequence and amino acid sequence of the recombinant fusion protein are listed under SEQ ID NOs 309 and 310). The gene synthesis fragment was designed as to contain first a Kozak site for eukaryotic expression of the construct, followed by a 19 amino acid immunoglobulin leader peptide, followed in frame by the coding sequence of the first 27 amino acids of the extracellular portion of the mature human CD3 epsilon chain, followed in frame by the coding sequence of the hinge region and Fc gamma portion of human IgG1 and a stop codon. The gene synthesis fragment was also designed as to introduce restriction sites at the beginning and at the end of the cDNA coding for the fusion protein. The introduced restriction sites, EcoRI at the 5′ end and SalI at the 3′ end, were utilised in the following cloning procedures. The gene synthesis fragment was cloned via EcoRI and SalI into a plasmid designated pEF-DHFR (pEF-DHFR is described in Raum et al. Cancer Immunol Immunother 50 (2001) 141-150) following standard protocols. The afore-mentioned procedures were carried out according to standard protocols (Sambrook, Molecular Cloning; A Laboratory Manual, 3rd edition, Cold Spring Harbour Laboratory Press, Cold Spring Harbour, N.Y. (2001)). A clone with sequence-verified nucleotide sequence was transfected into DHFR deficient CHO cells for eukaryotic expression of the construct. Eukaryotic protein expression in DHFR deficient CHO cells was performed as described by Kaufmann R. J. (1990) Methods Enzymol. 185, 537-566. Gene amplification of the construct was induced by increasing concentrations of methotrexate (MTX) to a final concentration of up to 20 nM MTX. After two passages of stationary culture the cells were grown in roller bottles with nucleoside-free HyQ PF CHO liquid soy medium (with 4.0 mM L-Glutamine with 0.1% Pluronic F-68; HyClone) for 7 days before harvest. The cells were removed by centrifugation and the supernatant containing the expressed protein was stored at −20° C. For the isolation of the fusion protein a goat anti-human fc affinity column was prepared according to standard protocols using a commercially available affinity purified goat anti-human IgG fc fragment specific antibody with minimal cross-reaction to bovine, horse, and mouse serum proteins (Jackson ImmunoResearch Europe Ltd.). Using this affinity column the fusion protein was isolated out of cell culture supernatant on an Akta Explorer System (GE Amersham) and eluted by citric acid. The eluate was neutralized and concentrated.

### 18.2 Pharmacokinetic Assay for Cross-Species Specific Bispecific Single Chain Molecules

[0470] The assay is based on the ECL-ELISA technology using ruthenium labelled detection on carbon plates measured on a Sektor Imager device (MSD). In a first step, carbon plates (MSD High Bind Plate 96 well Cat: L15xB-3) were coated with 5 μl/well at 50 ng/ml of the purified 1-27 CD3-Fc described in Example 18.1. The plate was then dried overnight at 25° C. Subsequently plates were blocked with 5% BSA (Paesel&Lorei #100568) in PBS at 150 μl/well for 1 h at 25° C. in an incubator while shaking (700 rpm). In the next step plates were washed three times with 0.05% Tween in PBS. A standard curve in 50% macaque serum in PBS was generated by serial 1:4 dilution starting at 100 ng/ml of the respective cross-species specific bispecific single chain molecule to be detected in the assay. Quality control (QC) samples were prepared in 50% macaque serum in PBS ranging from 1 ng/ml to 50 ng/ml of the respective cross-species specific bispecific single chain molecule dependent on the expected sample serum concentrations. Standard, QC or unknown samples were transferred to the carbon plates at 10 μl/well and incubated for 90 min at 25° C. in the incubator while shaking (700 rpm). Subsequently plates were washed three times with 0.05% Tween in PBS. For detection 25 μl/well of penta-His-Biotin antibody (Qiagen, 200 μg/ml in 0.05% Tween in PBS) was added and incubated for 1 h at 25° C. in an incubator while shaking (700 rpm). In a second detection step 25 μl/well Streptavidin-SulfoTag solution (MSD; Cat: R32AD-1; Lot: WO010903) was added and incubated for 1 h at 25° C. in an incubator while shaking (700 rpm). Subsequently plates were washed three times with 0.05% Tween in PBS. Finally 150 μl/well MSD Reading Buffer (MSD, Cat: R9ZC-1) was added and plates were read in the Sektor Imager device.

[0471] FIGS. 34 and 35 demonstrate the feasibility of detection of cross-species specific bispecific single chain molecules in serum samples of macaque monkeys for cross-species specific bispecific single chain molecules. The cross-species specific anti-CD3 single chain antibodies contained in the bispecific single chain molecules enable therefore via their specific binding properties a highly sensitive generic assay for detection of the cross-species specific bispecific single chain molecules. The assay set out above can be used in the context of formal toxicological studies that are needed for drug development and can be easily adapted for measurement of patient samples in connection with the clinical application of cross-species specific bispecific single chain molecules.

### 19. Generation of Recombinant Transmembrane Fusion Proteins of the N-Terminal Amino Acids 1-27 of CD3 Epsilon from Different Non-Chimpanzee Primates Fused to EpCAM from Cynomolgus Monkey (1-27 CD3-EpCAM)

### 19.1 Cloning and Expression of 1-27 CD3-EpCAM

[0472] CD3 epsilon was isolated from different non-chimpanzee primates (marmoset, tamarin, squirrel monkey) and swine. The coding sequences of the 1-27 N-terminal amino acids of CD3 epsilon chain of the mature human, common marmoset (Callithrix jacchus), cottontop tamarin (Saguinus oedipus), common squirrel monkey (Saimiri sciureus) and domestic swine (Sus scrofa; used as negative control) fused to the N-terminus of Flag tagged cynomolgus EpCAM were obtained by gene synthesis according to standard protocols (cDNA sequence and amino acid sequence of the recombinant fusion proteins are listed under SEQ ID NOs 231 to 240). The gene synthesis fragments were designed as to contain first a BsrGI site to allow for fusion in correct reading frame with the coding sequence of a 19 amino acid immunoglobulin leader peptide already present in the target expression vector, which was followed in frame by the coding sequence of the N-terminal 1-27 amino acids of the extracellular portion of the mature CD3 epsilon chains, which was followed in frame by the coding sequence of a Flag tag and followed in frame by the coding sequence of the mature cynomolgus EpCAM transmembrane protein. The gene synthesis fragments were also designed to introduce a restriction site at the end of the cDNA coding for the fusion protein. The introduced restriction sites BsrGI at the 5′ end and SalI at the 3′ end, were utilized in the following cloning procedures. The gene synthesis fragments were then cloned via BsrGI and SalI into a derivative of the plasmid designated pEF-DHFR (pEF-DHFR is described in Raum et al. Cancer Immunol Immunother 50 (2001) 141-150), which already contains the coding sequence of the 19 amino acid immunoglobulin leader peptide following standard protocols. Sequence verified plasmids were used to transfect DHFR deficient CHO cells for eukaryotic expression of the construct. Eukaryotic protein expression in DHFR deficient CHO cells was performed as described by Kaufmann R. J. (1990) Methods Enzymol. 185, 537-566. Gene amplification of the construct was induced by increasing concentrations of methotrexate (MTX) to a final concentration of up to 20 nM MTX.

[0473] Transfectants were tested for cell surface expression of the recombinant transmembrane protein via an FACS assay according to standard protocols. For that purpose a number of 2.5×10⁵ cells were incubated with 50 μl of the anti-Flag M2 antibody (Sigma-Aldrich Chemie GmbH, Taufkirchen, Germany) at 5 μg/ml in PBS with 2% FCS. Bound antibody was detected with an R-Phycoerythrin-conjugated affinity purified F(ab′)2 fragment, goat anti-mouse IgG, Fc-gamma fragment specific 1:100 in PBS with 2% FCS (Jackson ImmunoResearch Europe Ltd., Newmarket, Suffolk, UK). Flow cytometry was performed on a FACS-Calibur apparatus, the CellQuest software was used to acquire and analyze the data (Becton Dickinson biosciences, Heidelberg). FACS staining and measuring of the fluorescence intensity were performed as described in Current Protocols in Immunology (Coligan, Kruisbeek, Margulies, Shevach and Strober, Wiley-Interscience, 2002).

[0474] Expression of the Flag tagged recombinant transmembrane fusion proteins consisting of cynomolgus EpCAM and the 1-27 N-terminal amino acids of the human, marmoset, tamarin, squirrel monkey and swine CD3 epsilon chain respectively on transfected cells is clearly detectable (FIG. 36).

### 19.2 Cloning and Expression of the Cross-Species Specific Anti-CD3 Single Chain Antibody I2C HL in Form of an IgG1 Antibody

[0475] In order to provide improved means of detection of binding of the cross-species specific single chain anti-CD3 antibody the I2C VHVL specificity is converted into an IgG1 antibody with murine IgG1 and murine kappa constant regions. cDNA sequences coding for the heavy chain of the IgG antibody were obtained by gene synthesis according to standard protocols. The gene synthesis fragments were designed as to contain first a Kozak site to allow for eukaryotic expression of the construct, which is followed by an 19 amino acid immunoglobulin leader peptide, which is followed in frame by the coding sequence of the heavy chain variable region or light chain variable region, followed in frame by the coding sequence of the heavy chain constant region of murine IgG1 as published in GenBank (Accession number AB097849) or the coding sequence of the murine kappa light chain constant region as published in GenBank (Accession number D14630), respectively.

[0476] Restriction sites were introduced at the beginning and the end of the cDNA coding for the fusion protein. Restriction sites EcoRI at the 5′ end and SalI at the 3′ end were used for the following cloning procedures. The gene synthesis fragments were cloned via EcoRI and SalI into a plasmid designated pEF-DHFR (pEF-DHFR is described in Raum et al. Cancer Immunol Immunother 50 (2001) 141-150) for the heavy chain construct and pEFADA (pEFADA is described in Raum et al. Cancer Immunol Immunother 50 (2001) 141-150) for the light chain construct according to standard protocols. Sequence verified plasmids were used for co-transfection of respective light and heavy chain constructs into DHFR deficient CHO cells for eukaryotic expression of the construct. Eukaryotic protein expression in DHFR deficient CHO cells was performed as described by Kaufmann R. J. (1990) Methods Enzymol. 185, 537-566. Gene amplification of the constructs was induced by increasing concentrations of methotrexate (MTX) to a final concentration of up to 20 nM MTX and deoxycoformycin (dCF) to a final concentration of up to 300 nM dCF. After two passages of stationary culture cell culture supernatant was collected and used in the subsequent experiment.

### 19.3 Binding of the Cross-Species Specific Anti-CD3 Single Chain Antibody I2C HL in Form of an IgG1 Antibody to 1-27 CD3-EpCAM

[0477] Binding of the generated I2C IgG1 construct to the 1-27 N-terminal amino acids of the human, marmoset, tamarin and squirrel monkey CD3 epsilon chains respectively fused to cynomolgus Ep-CAM as described in Example 19.1 was tested in a FACS assay according to standard protocols. For that purpose a number of 2.5×10⁵ cells were incubated with 50 μl of cell culture supernatant containing the I2C IgG1 construct as described in Example 19.2. The binding of the antibody was detected with an R-Phycoerythrin-conjugated affinity purified F(ab′)2 fragment, goat anti-mouse IgG, Fc-gamma fragment specific, diluted 1:100 in PBS with 2% FCS (Jackson ImmunoResearch Europe Ltd., Newmarket, Suffolk, UK). Flow cytometry was performed on a FACS-Calibur apparatus, the CellQuest software was used to acquire and analyze the data (Becton Dickinson biosciences, Heidelberg). FACS staining and measuring of the fluorescence intensity were performed as described in Current Protocols in Immunology (Coligan, Kruisbeek, Margulies, Shevach and Strober, Wiley-Interscience, 2002).

[0478] As shown in FIG. 37 binding of the I2C IgG1 construct to the transfectants expressing the recombinant transmembrane fusion proteins consisting of the 1-27 N-terminal amino acids of CD3 epsilon of human, marmoset, tamarin or squirrel monkey fused to cynomolgus EpCAM as compared to the negative control consisting of the 1-27 N-terminal amino acids of CD3 epsilon of swine fused to cynomolgus EpCAM was observed. Thus multi-primate cross-species specificity of I2C was demonstrated. Signals obtained with the anti Flag M2 antibody and the I2C IgG1 construct were comparable, indicating a strong binding activity of the cross-species specific specificity I2C to the N-terminal amino acids 1-27 of CD3 epsilon.

### 20. Binding of the Cross-Species Specific Anti-CD3 Binding Molecule I2C to the Human CD3 Epsilon Chain with and without N-Terminal His6 Tag

[0479] A chimeric IgG1 antibody with the binding specificity I2C as described in Example 19.2 specific for CD3 epsilon was tested for binding to human CD3 epsilon with and without N-terminal His6 tag. Binding of the antibody to the EL4 cell lines transfected with His6-human CD3 epsilon as described in Example 6.1 and wild-type human CD3 epsilon as described in Example 5.1 respectively was tested by a FACS assay according to standard protocols. 2.5×10⁵ cells of the transfectants were incubated with 50 μl of cell culture supernatant containing the I2C IgG1 construct or 50 μl of the respective control antibodies at 5 μg/ml in PBS with 2% FCS. As negative control an appropriate isotype control and as positive control for expression of the constructs the CD3 specific antibody UCHT-1 were used respectively. Detection of the His6 tag was performed with the penta His antibody (Qiagen). The binding of the antibodies was detected with a R-Phycoerythrin-conjugated affinity purified F(ab′)2 fragment, goat anti-mouse IgG, Fc-gamma fragment specific, diluted 1:100 in PBS with 2% FCS (Jackson ImmunoResearch Europe Ltd., Newmarket, Suffolk, UK). Flow cytometry was performed on a FACS-Calibur apparatus, the CellQuest software was used to acquire and analyze the data (Becton Dickinson biosciences, Heidelberg). FACS staining and measuring of the fluorescence intensity were performed as described in Current Protocols in Immunology (Coligan, Kruisbeek, Margulies, Shevach and Strober, Wiley-Interscience, 2002).

[0480] Comparable binding of the anti-human CD3 antibody UCHT-1 to both transfectants demonstrates approximately equal levels of expression of the constructs. The binding of the penta His antibody confirmed the presence of the His6 tag on the His6-human CD3 construct but not on the wild-type construct.

[0481] Compared to the EL4 cell line transfected with wild-type human CD3 epsilon a clear loss of binding of the I2C IgG1 construct to human-CD3 epsilon with an N-terminal His 6 tag was detected. These results show that a free N-terminus of CD3 epsilon is essential for binding of the cross-species specific anti-CD3 binding specificity I2C to the human CD3 epsilon chain (FIG. 28).

### 21. Generation of CD33 and CD3 Cross-Species Specific Bispecific Single Chain Molecules

### 21.1 Generation of CD33 and CD3 Cross-Species Specific Bispecific Single Chain Molecules

[0482] Generally, bispecific single chain antibody molecules, each comprising a domain with a binding specificity cross-species specific for human and macaque CD3epsilon as well as a domain with a binding specificity cross-species specific for human and macaque CD33, were designed as set out in the following Table 6:

TABLE 6
Formats of anti-CD3 and anti-CD33 cross-species specific bispecific single
chain antibody molecules

| SEQ ID | Formats of protein constructs |
|---|---|
| (nucl/prot) | (N → C) |
| 316/315 | I2CHL × AF5HL |
| 314/313 | F12QHL × AF5HL |
| 312/311 | H2CHL × AF5HL |

[0483] The aforementioned constructs containing the variable light-chain (L) and variable heavy-chain (H) domains cross-species specific for human and macaque CD33 and the CD3 specific VH and VL combinations cross-species specific for human and macaque CD3 were obtained by gene synthesis. The gene synthesis fragments were designed as to contain first a Kozak site for eukaryotic expression of the construct, followed by a 19 amino acid immunoglobulin leader peptide, followed in frame by the coding sequence of the respective bispecific single chain antibody molecule, followed in frame by the coding sequence of a histidine₆-tag and a stop codon. The gene synthesis fragment was also designed as to introduce suitable restriction sites at the beginning and at the end of the fragment. The introduced restriction sites were utilised in the following cloning procedures. The gene synthesis fragment was cloned via these restriction sites into a plasmid designated pEF-DHFR (pEF-DHFR is described in Raum et al. Cancer Immunol Immunother 50 (2001) 141-150) following standard protocols. The aforementioned procedures were carried out according to standard protocols (Sambrook, Molecular Cloning; A Laboratory Manual, 3rd edition, Cold Spring Harbour Laboratory Press, Cold Spring Harbour, N.Y. (2001)). A clone with sequence-verified nucleotide sequence was transfected into DHFR deficient CHO cells for eukaryotic expression of the construct. Eukaryotic protein expression in DHFR deficient CHO cells was performed as described by Kaufmann R. J. (1990) Methods Enzymol. 185, 537-566. Gene amplification of the construct was induced by increasing concentrations of methotrexate (MTX) to a final concentration of up to 20 nM MTX. After two passages of stationary culture cell culture supernatant was collected and used in the subsequent experiments.

### 21.2 Flow Cytometric Binding Analysis of the CD33 and CD3 Cross-Species Specific Bispecific Antibodies

[0484] In order to test the functionality of the cross-species specific bispecific antibody constructs regarding the capability to bind to human and macaque CD33 and CD3, respectively, a FACS analysis is performed. For this purpose CHO cells transfected with human CD33 as described in Example 16.1 and the human CD3 positive T cell leukemia cell line HPB-ALL (DSMZ, Braunschweig, ACC483) were used to test the binding to human antigens. The binding reactivity to macaque antigens was tested by using the generated macaque CD33 transfectant described in Example 16.2 and macaque PBMC (preparation of macaque PBMC was performed by Ficoll gradient centrifugation of peripheral blood from macaque monkeys according to standard protocols). 200000 cells of the respective cell lines or PBMC were incubated for 30 min. on ice with 50 μl of cell culture supernatant of transfected cells expressing the cross-species specific bispecific antibody constructs. The cells were washed twice in PBS with 2% FCS and binding of the construct was detected with a murine anti-His antibody (Penta His antibody; Qiagen; diluted 1:20 in 50 μl PBS with 2% FCS). After washing, bound anti-His antibodies were detected with an Fc gamma-specific antibody (Dianova) conjugated to phycoerythrin, diluted 1:100 in PBS with 2% FCS. Supernatant of untransfected CHO cells was used as negative control.

[0485] Flow cytometry was performed on a FACS-Calibur apparatus; the CellQuest software was used to acquire and analyze the data (Becton Dickinson biosciences, Heidelberg). FACS staining and measuring of the fluorescence intensity were performed as described in Current Protocols in Immunology (Coligan, Kruisbeek, Margulies, Shevach and Strober, Wiley-Interscience, 2002).

[0486] The bispecific binding of the single chain molecules listed above, which were cross-species specific for CD33 and cross-species specific for human and non-chimpanzee primate CD3 was clearly detectable as shown in FIG. 41. In the FACS analysis all constructs showed binding to CD3 and CD33 as compared to the respective negative controls. Cross-species specificity of the bispecific antibodies to human and macaque CD3 and CD33 antigens was demonstrated.

### 21.3. Bioactivity of CD33 and CD3 Cross-Species Specific Bispecific Single Chain Antibodies

[0487] Bioactivity of the generated bispecific single chain antibodies was analyzed by chromium 51 (⁵¹Cr) release in vitro cytotoxicity assays using the CD33 positive cell lines described in Examples 16.1 and 16.2. As effector cells stimulated human CD4/CD56 depleted PBMC or the macaque T cell line 4119LnPx were used as specified in the respective figures.

[0488] A Petri dish (145 mm diameter, Greiner bio-one GmbH, Kremsmunster) was coated with a commercially available anti-CD3 specific antibody (e.g. OKT3, Orthoclone) in a final concentration of 1 μg/ml for 1 hour at 37° C. Unbound protein was removed by one washing step with PBS. The fresh PBMC were isolated from peripheral blood (30-50 ml human blood) by Ficoll gradient centrifugation according to standard protocols. 3-5×10⁷ PBMC were added to the precoated Petri dish in 120 ml of RPMI 1640 with stabilized glutamine/10% FCS/IL-2 20 U/ml (Proleukin, Chiron) and stimulated for 2 days. On the third day the cells were collected and washed once with RPMI 1640. IL-2 is added to a final concentration of 20 U/ml and the cells were cultivated again for one day in the same cell culture medium as above.

[0489] By depletion of CD4+ T cells and CD56+ NK cells according to standard protocols CD8+ cytotoxic T lymphocytes (CTLs) were enriched.

[0490] Target cells were washed twice with PBS and labelled with 11.1 MBq ⁵¹Cr in a final volume of 100 μl RPMI with 50% FCS for 45 minutes at 37° C. Subsequently the labelled target cells were washed 3 times with 5 ml RPMI and then used in the cytotoxicity assay. The assay was performed in a 96 well plate in a total volume of 250 μl supplemented RPMI (as above) with an E:T ratio of 10:1. Supernatant of cells expressing the cross-species specific bispecific single chain antibody molecules in a final concentration of 50% and 20 threefold dilutions thereof were applied. The assay time is 18 hours and cytotoxicity was measured as relative values of released chromium in the supernatant related to the difference of maximum lysis (addition of Triton-X) and spontaneous lysis (without effector cells). All measurements were done in quadruplicates. Measurement of chromium activity in the supernatants was performed with a Wizard 3″ gamma counter (Perkin Elmer Life Sciences GmbH, Köln, Germany). Analysis of the experimental data was performed with Prism 4 for Windows (version 4.02, GraphPad Software Inc., San Diego, Calif., USA). Sigmoidal dose response curves typically have R² values >0.90 as determined by the software. EC₅₀ values calculated by the analysis program were used for comparison of bioactivity.

[0491] As shown in FIG. 42, all of the generated cross-species specific bispecific single chain antibody constructs demonstrate cytotoxic activity against human CD33 positive target cells elicited by stimulated human CD4/CD56 depleted PBMC and against macaque CD33 positive target cells elicited by the macaque T cell line 4119LnPx.

### 22. Redistribution of Circulating Chimpanzee T Cells Upon Exposure to a Conventional Bispecific CD3 Binding Molecule Directed at a Target Molecule which is Absent from Circulating Blood Cells

[0492] A single male chimpanzee was subjected to dose escalation with intravenous single-chain EpCAM/CD3-bispecific antibody construct (Schlereth (2005) Cancer Res 65: 2882). Like in the conventional single-chain CD19/CD3-bispecific antibody construct (Loffler (2000, Blood, Volume 95, Number 6) or WO 99/54440), the CD3 arm of said EpCAM/CD3-construct is also directed against a conventional context dependent epitope of human and chimpanzee CD3. At day 0, the animal received 50 ml PBS/5% HSA without test material, followed by 50 ml PBS/5% HSA plus single-chain EpCAM/CD3-bispecific antibody construct at 1.6, 2.0, 3.0 and 4.5 μg/kg on days 7, 14, 21 and 28, respectively. The infusion period was 2 hours per administration. For each weekly infusion the chimpanzee was sedated with 2-3 mg/kg Telazol intramuscularly, intubated and placed on isoflurane/O₂ anesthesia with stable mean blood pressures. A second intravenous catheter was placed in an opposite limb to collect (heparinized) whole blood samples at the time points indicated in FIG. 43 for FACS analysis of circulating blood cells. After standard erythrocyte lysis, T cells were stained with a FITC-labeled antibody reacting with chimpanzee CD2 (Becton Dickinson) and the percentage of T cells per total lymphocytes determined by flowcytometry. As shown in FIG. 43, every administration of single-chain EpCAM/CD3-bispecific antibody construct induced a rapid drop of circulating T cells as observed with single-chain CD19/CD3-bispecific antibody construct in B-NHL patients, who had essentially no circulating target B (lymphoma) cells. As there are no EpCAM-positive target cells in the circulating blood of humans and chimpanzees, the drop of circulating T cells upon exposure to the single-chain EpCAM/CD3-bispecific antibody construct can be attributed solely to a signal, which the T cells receive through pure interaction of the CD3 arm of the construct with a conventional context dependent CD3 epitope in the absence of any target cell mediated crosslinking. Like the redistribution of T cells induced through their exposure to single-chain CD19/CD3-bispecific antibody construct in B-NHL patients, who had essentially no circulating target B (lymphoma) cells, the T cell redistribution in the chimpanzee upon exposure to the single-chain EpCAM/CD3-bispecific antibody construct can be explained by a conformational change of CD3 following the binding event to a context dependent CD3 epitope further resulting in the transient increase of T cell adhesiveness to blood vessel endothelium (see Example 13). This finding confirms, that conventional CD3 binding molecules directed to context dependent CD3 epitopes—solely through this interaction—can lead to a redistribution pattern of peripheral blood T cells, which is associated with the risk of CNS adverse events in humans as describe in Example 13.

### 23. Specific Binding of scFv Clones to the N-Terminus of Human CD3 Epsilon

[0493] 23.1 Bacterial Expression of scFv Constructs in E. coli XL1 Blue

[0494] As previously mentioned, E. coli XL1 Blue transformed with pComb3H5Bhis/Flag containing a VL- and VH-segment produce soluble scFv in sufficient amounts after excision of the gene III fragment and induction with 1 mM IPTG. The scFv-chain is exported into the periplasma where it folds into a functional conformation.

[0495] The following scFv clones were chosen for this experiment:

i) ScFvs 4-10, 3-106, 3-114, 3-148, 4-48, 3-190 and 3-271 as described in WO 2004/106380.
ii) ScFvs from the human anti-CD3epsilon binding clones H2C, F12Q and I2C as described herein.

[0496] For periplasmic preparations, bacterial cells transformed with the respective scFv containing plasmids allowing for periplasmic expression were grown in SB-medium supplemented with 20 mM MgCl₂ and carbenicillin 50 μg/ml and redissolved in PBS after harvesting. By four rounds of freezing at −70° C. and thawing at 37° C., the outer membrane of the bacteria was destroyed by osmotic shock and the soluble periplasmic proteins including the scFvs were released into the supernatant. After elimination of intact cells and cell-debris by centrifugation, the supernatant containing the human anti-human CD3-scFvs was collected and used for further examination. These crude supernatants containing scFv will be further termed periplasmic preparations (PPP).

23.2 Binding of scFvs to Human CD3 Epsilon (aa 1-27)-Fc Fusion Protein

[0497] ELISA experiments were carried out by coating the human CD3 epsilon (aa 1-27)-Fc fusion protein to the wells of 96 well plastic plates (Nunc, maxisorb) typically at 4° C. over night. The antigen coating solution was then removed, wells washed once with PBS/0.05% Tween 20 and subsequently blocked with PBS/3% BSA for at least one hour. After removal of the blocking solution, PPPs and control solutions were added to the wells and incubated for typically one hour at room temperature. The wells were then washed three times with PBS/0.05% Tween 20. Detection of scFvs bound to immobilized antigen was carried out using a Biotin-labeled anti FLAG-tag antibody (M2 anti Flag-Bio, Sigma, typically at a final concentration of 1 μg/ml PBS) and detected with a peroxidase-labeled Streptavidine (Dianova, 1 μg/ml PBS). The signal was developed by adding ABTS substrate solution and measured at a wavelength of 405 nm. Unspecific binding of the test-samples to the blocking agent and/or the human IgG1 portion of the human CD3 epsilon (aa 1-27)-Fc fusion protein was examined by carrying out the identical assay with the identical reagents and identical timing on ELISA plates which were coated with human IgG1 (Sigma). PBS was used as a negative control.

[0498] As shown in FIG. 44, scFvs H2C, F12Q and I2C show strong binding signals on human CD3 epsilon (aa 1-27)-Fc fusion protein. The human scFvs 3-106, 3-114, 3-148, 3-190, 3-271, 4-10 and 4-48 (as described in WO 2004/106380) do not show any significant binding above negative control level.

[0499] To exclude the possibility that the positive binding of scFvs H2C, F12Q and I2C to wells coated with human CD3 epsilon (aa 1-27)-Fc fusion protein might be due to binding to BSA (used as a blocking agent) and/or the human IgG1 Fc-gamma-portion of the human CD3 epsilon (aa 1-27)-Fc fusion protein, a second ELISA experiment was performed in parallel. In this second ELISA experiment, all parameters were identical to those in the first ELISA experiment, except that in the second ELISA experiment human IgG1 (Sigma) was coated instead of human CD3 epsilon (aa 1-27)-Fc fusion protein. As shown in FIG. 45, none of the scFvs tested showed any significant binding to BSA and/or human IgG1 above background level.

[0500] Taken together, these results allow the conclusion that conventional CD3 binding molecules recognizing a context-dependent epitope of CD3 epsilon (e.g. as disclosed in WO 2004/106380) do not bind specifically to the human CD3 epsilon (aa 1-27)-region, whereas the scFvs H2C, F12Q and I2C binding a context-independent epitope of CD3 epsilon clearly show specific binding to the N-terminal 27 amino acids of human CD3 epsilon.

### 24. Generation and Characterization of Single Domain EGFR and CD3 Cross-Species Specific Bispecific Single Chain Molecules

[0501] 24.1 Generation of CHO Cells Transfected with Human EGFR

[0502] The cell line positive for human EGFR, A431 (epidermoid carcinoma cell line, CRL-1555, American Type Culture Collection, Rockville, Md.) was used to obtain total RNA that was isolated according to the instructions of the kit manual (Qiagen, RNeasy Mini Kit, Hilden, Germany). The obtained RNA was used for cDNA synthesis by random-primed reverse transcription. For cloning of the full length sequence of the human EGFR antigen the following oligonucleotides were used:

5′ EGFR AG XbaI

(SED ID NO 402)

5′-GGTCTAGAGCATGCGACCCTCCGGGACGGCCGGG-3′
3′ EGFR AG SalI

(SEQ ID NO 403)

5′-TTTTAAGTCGACTCATGCTCCAATAAATTCACTGCT-3′

[0503] The coding sequence was amplified by PCR (denaturation at 94° C. for 5 min, annealing at 58° C. for 1 min, elongation at 72° C. for 2 min for the first cycle; denaturation at 94° C. for 1 min, annealing at 58° C. for 1 min, elongation at 72° C. for 2 min for 30 cycles; terminal extension at 72° C. for 5 min). The PCR product was subsequently digested with XbaI and SalI, ligated into the appropriately digested expression vector pEF-DHFR (Raum et al., Cancer Immunol. Immunother. 2001; 50: 141-150), and transformed into E. coli. The afore-mentioned procedures were carried out according to standard protocols (Sambrook, Molecular Cloning; A Laboratory Manual, 3rd edition, Cold Spring Harbour Laboratory Press, Cold Spring Harbour, N.Y. (2001)). A clone with sequence-verified nucleotide sequence (SEQ ID 370, Amino acid sequence SEQ ID 369) was transfected into DHFR deficient CHO cells for eukaryotic expression of the construct. Eukaryotic protein expression in DHFR deficient CHO cells was performed as described by Kaufmann R. J. (1990) Methods Enzymol. 185, 537-566. Gene amplification of the construct was induced by increasing concentrations of methothrexate (MTX) to a final concentration of up to 20 nM MTX.

### 24.2 Generation of CHO Cells Expressing the Extracellular Domain of Macaque EGFR

[0504] The cDNA sequence of the extracellular domain of macaque EGFR was obtained by a set of two PCRs on macaque monkey colon cDNA (Cat#: C1534090-Cy-BC; obtained from BioCat GmbH, Heidelberg, Germany) using the following reaction conditions: 1 cycle at 94° C. for 3 minutes followed by 35 cycles with 94° C. for 1 minute, 53° C. for 1 minute and 72° C. for 2 minutes followed by a terminal cycle of 72° C. for 3 minutes. The following primers were used:

4. forward primer:

(SEQ ID NO 404)

5′-CGCTCTGCCCGGCGAGTCGGGC-3′
reverse primer:

(SEQ ID NO 405)

5′-CCGTCTTCCTCCATCTCATAGC-3′
5. forward primer:

(SEQ ID NO 406)

5′-ACATCCGGAGGTGACAGATCACGGCTCGTGC-3′
reverse primer:

(SEQ ID NO 407)

5′-CAGGATATCCGAACGATGTGGCGCCTTCGC-3′

[0505] Those PCRs generated two overlapping fragments (A: 1-869, B: 848-1923), which were isolated and sequenced according to standard protocols using the PCR primers, and thereby provided a 1923 bp portion of the cDNA sequence of macaque EGFR from the third nucleotide of codon +1 of the mature protein to the 21^{st} codon of the transmembrane domain. To generate a construct for expression of macaque EGFR a cDNA fragment was obtained by gene synthesis according to standard protocols (the cDNA and amino acid sequence of the construct is listed under SEQ ID Nos 372 and 371). In this construct the coding sequence for macaque EGFR from amino acid +2 to +641 of the mature EGFR protein was fused into the coding sequence of human EGFR replacing the coding sequence of the amino acids +2 to +641. The gene synthesis fragment was also designed as to contain a Kozak site for eukaryotic expression of the construct and restriction sites at the beginning and the end of the cDNA coding for essentially the extracellular domain of macaque EGFR fused to the transmembrane and intracellular domains of human EGFR. Furthermore a conservative mutation was introduced at amino acid 627 (4^{th} amino acid of the transmembrane domain) mutating valine into leucine to generate a restriction site (SphI) for cloning purposes. The introduced restriction sites XbaI at the 5′ end and SalI at the 3′ end, were utilised in the following cloning procedures. The gene synthesis fragment was then cloned via XbaI and SalI into a plasmid designated pEF-DHFR (pEF-DHFR is described in Mack et al. Proc. Natl. Acad. Sci. USA 92 (1995) 7021-7025). A sequence verified clone of this plasmid was used to transfect CHO/dhfr-cells as described above.

### 24.3 Cloning of Cross-Species Specific Single Domain Binding Molecules

[0506] Generally, bispecific single chain antibody molecules, each comprising a domain with a binding specificity cross-species specific for human and non-chimpanzee primate CD3 epsilon as well as a domain with a binding specificity cross-species specific for human and non-chimpanzee primate EGFR, were designed as set out in the following Table 7:

TABLE 7
Formats of anti-CD3 and anti-EGFR cross-species specific single domain
bispecific single chain antibody molecules

| SEQ ID | Formats of protein constructs |
|---|---|
| (nucl/prot) | (N → C) |
| 381/380 | EGFR 3D-E8 × I2C HL |
| 385/384 | EGFR 3D-E8 × F12Q HL |
| 383/382 | EGFR 3D-E8 × H2C HL |
| 392/391 | EGFR 3D-D12 × I2C HL |
| 396/395 | EGFR 3D-D12 × F12Q HL |
| 394/393 | EGFR 3D-D12 × H2C HL |

[0507] The aforementioned constructs containing the variable chain cross-species specific for human and macaque EGFR and CD3 were obtained by gene synthesis. The gene synthesis fragments were designed as to contain first a Kozak site for eukaryotic expression of the construct, followed by a 19 amino acid immunoglobulin leader peptide, followed in frame by the coding sequence of the respective bispecific single chain antibody molecule, followed in frame by the coding sequence of a 6 histidine tag and a stop codon. The gene synthesis fragment was also designed as to introduce suitable restriction sites at the beginning and at the end of the fragment. The introduced restriction sites were utilized in the following cloning procedures. The gene synthesis fragment was also designed as to introduce suitable N- and C-terminal restriction sites. The gene synthesis fragment was cloned via these restriction sites into a plasmid designated pEF-DHFR (pEF-DHFR is described in Raum et al. Cancer Immunol Immunother 50 (2001) 141-150) according to standard protocols (Sambrook, Molecular Cloning; A Laboratory Manual, 3rd edition, Cold Spring Harbour Laboratory Press, Cold Spring Harbour, N.Y. (2001)). A clone with sequence-verified nucleotide sequence was transfected into dihydrofolate reductase (DHFR) deficient Chinese hamster ovary (CHO) cells for eukaryotic expression of the construct.

[0508] The constructs were transfected stably or transiently into DHFR-deficient CHO-cells (ATCC No. CRL 9096) by electroporation or alternatively into HEK 293 (human embryonal kidney cells, ATCC Number: CRL-1573) in a transient manner according to standard protocols.

### 24.4. Expression and Purification of the Single Domain Bispecific Single Chain Antibody Molecules

[0509] The single domain bispecific single chain antibody molecules were expressed in chinese hamster ovary cells (CHO). Eukaryotic protein expression in DHFR deficient CHO cells was performed as described by Kaufmann R. J. (1990) Methods Enzymol. 185, 537-566. Gene amplification of the constructs was induced by increasing final concentrations of MTX up to 20 nM. After two passages of stationary culture the cells were grown in roller bottles with nucleoside-free HyQ PF CHO liquid soy medium (with 4.0 mM L-Glutamine with 0.1% Pluronic F-68; HyClone) for 7 days before harvest. The cells were removed by centrifugation and the supernatant containing the expressed protein was stored at −20° C. Alternatively, constructs were transiently expressed in HEK 293 cells. Transfection was performed with 293fectin reagent (Invitrogen, #12347-019) according to the manufacturer's protocol.

[0510] Äkta® Explorer System (GE Health Systems) and Unicorn® Software were used for chromatography. Immobilized metal affinity chromatography (“IMAC”) was performed using a Fractogel EMD chelate® (Merck) which was loaded with ZnCl2 according to the protocol provided by the manufacturer. The column was equilibrated with buffer A (20 mM sodium phosphate buffer pH 7.2, 0.1 M NaCl) and the cell culture supernatant (500 ml) was applied to the column (10 ml) at a flow rate of 3 ml/min. The column was washed with buffer A to remove unbound sample. Bound protein was eluted using a two step gradient of buffer B (20 mM sodium phosphate buffer pH 7.2, 0.1 M NaCl, 0.5 M Imidazol) according to the following:

Step 1: 20% buffer B in 6 column volumes
Step 2: 100% buffer B in 6 column volumes

[0511] Eluted protein fractions from step 2 were pooled for further purification. All chemicals were of research grade and purchased from Sigma (Deisenhofen) or Merck (Darmstadt).

[0512] Gel filtration chromatography was performed on a HiLoad 16/60 Superdex 200 prep grade column (GE/Amersham) equilibrated with Equi-buffer (25 mM Citrat, 200 mM Lysin, 5% Glycerol, pH 7.2). Eluted protein samples (flow rate 1 ml/min) were subjected to standard SDS-PAGE and Western Blot for detection. Prior to purification, the column was calibrated for molecular weight determination (molecular weight marker kit, Sigma MW GF-200). Protein concentrations were determined using OD280 nm.

[0513] Purified bispecific single chain antibody protein was analyzed in SDS PAGE under reducing conditions performed with pre-cast 4-12% Bis Tris gels (Invitrogen). Sample preparation and application were performed according to the protocol provided by the manufacturer. The molecular weight was determined with MultiMark protein standard (Invitrogen). The gel was stained with colloidal Coomassie (Invitrogen protocol). The purity of the isolated protein was >95% as determined by SDS-PAGE.

[0514] Western Blot was performed using an Optitran® BA-S83 membrane and the Invitrogen Blot Module according to the protocol provided by the manufacturer. The antibodies used were directed against the His Tag (Penta His, Qiagen) and Goat-anti-mouse Ig labeled with alkaline phosphatase (AP) (Sigma), and BCIP/NBT (Sigma) as substrate.

### 24.5. Flow Cytometric Binding Analysis of the EGFR and CD3 Cross-Species Specific Single Domain Bispecific Antibodies

[0515] In order to test the functionality of the single domain cross-species specific bispecific antibody constructs with regard to binding capability to human and macaque EGFR and CD3, respectively, a FACS analysis was performed. For this purpose CHO cells transfected with human EGFR as described in Example 24.1 and human CD3 positive T cell leukemia cell line Jurkat (DSMZ, Braunschweig, ACC 282) were used to test the binding to human antigens. The binding reactivity to macaque antigens was tested by using the generated macaque EGFR transfectant described in Example 24.2 and a macaque T cell line 4119LnPx (kindly provided by Prof Fickenscher, Hygiene Institute, Virology, Erlangen-Nuernberg; published in Knappe A, et al., and Fickenscher H., Blood 2000, 95, 3256-61). 200.000 cells of the respective cell population were incubated for 30 min on ice with 50 μl of the purified protein of the cross-species specific bispecific antibody constructs (2 μg/ml). Alternatively, the cell culture supernatant of transiently produced proteins was used. The cells were washed twice in PBS and binding of the construct was detected with a murine Penta His antibody (Qiagen; diluted 1:20 in 50 μl PBS with 2% FCS). After washing, bound anti His antibodies were detected with an Fc gamma-specific antibody (Dianova) conjugated to phycoerythrin, diluted 1:100 in PBS with 2% FCS. Fresh culture medium was used as a negative control.

[0516] Flow cytometry was performed on a FACS-Calibur apparatus, the CellQuest software was used to acquire and analyze the data (Becton Dickinson biosciences, Heidelberg). FACS staining and measuring of the fluorescence intensity were performed as described in Current Protocols in Immunology (Coligan, Kruisbeek, Margulies, Shevach and Strober, Wiley-Interscience, 2002).

[0517] The binding ability of several single domain bispecific single chain molecules which are specific for EGFR and cross-species specific for human and non-chimpanzee primate CD3 were clearly detectable as shown in FIG. 46/1 and FIG. 46/2 In the FACS analysis, all constructs showed binding to CD3 and EGFR compared to culture medium and first and second detection antibody as the negative controls. Cross-species specificity of the bispecific antibody to human and macaque CD3 and EGFR antigens was demonstrated.

### 24.6. Bioactivity of EGFR and CD3 Cross-Species Specific Single Domain Bispecific Single Chain Antibodies

[0518] Bioactivity of the generated single domain bispecific single chain antibodies was analyzed by chromium 51 (⁵¹Cr) release in vitro cytotoxicity assays using the EGFR positive cell lines described in Examples 24.1 and 24.2. As effector cells stimulated human CD8 positive T cells or the macaque T cell line 4119LnPx were used, respectively.

[0519] Stimulated CD8+ T cells were obtained as follows:

A Petri dish (145 mm diameter, Greiner) was pre-coated with a commercially available anti-CD3 specific antibody in a final concentration of 1 μg/ml for 1 hour at 37° C. Unbound protein was removed by one washing step with PBS. The fresh PBMC's were isolated from peripheral blood (30-50 ml human blood) by Ficoll gradient centrifugation according to standard protocols. 3-5×10⁷ PBMCs were added to the precoated petri dish in 120 ml of RPMI 1640/10% FCS/IL-2 20 U/ml (Proleukin, Chiron) and stimulated for 2 days. At the third day the cells were collected, washed once with RPMI 1640. IL-2 was added to a final concentration of U/ml and cultivated again for one day. CD8+ cytotoxic T lymphocytes (CTLs) were isolated by depletion of CD4+ T cells and CD56+ NK cells.

[0520] Target cells were washed twice with PBS and labeled with 11.1 MBq ⁵¹Cr in a final volume of 100 μl RPMI with 50% FCS for 45 minutes at 37° C. Subsequently the labeled target cells were washed 3 times with 5 ml RPMI and then used in the cytotoxicity assay. The assay was performed in a 96 well plate in a total volume of 250 μl supplemented RPMI (as above) with an E:T ratio of 10:1. 1 μg/ml of the cross-species specific bispecific single chain antibody molecules and 20 threefold dilutions thereof were applied. Alternatively cell culture supernatant of transiently produced proteins was serially diluted in 1:2 steps. The assay time is 18 hours and cytotoxicity was measured as relative values of released chromium in the supernatant related to the difference of maximum lysis (addition of Triton-X) and spontaneous lysis (without effector cells). All measurements were done in quadruplicates. Measurement of chromium activity in the supernatants was performed with a Wizard 3″ gammacounter (Perkin Elmer Life Sciences GmbH, KoIn, Germany). Analysis of the experimental data was performed with Prism 4 for Windows (version 4.02, GraphPad Software Inc., San Diego, Calif., USA). Sigmoidal dose response curves typically had R2 values >0.90 as determined by the software. EC50 values calculated by the analysis program were used for comparison of bioactivity.

[0521] As shown in FIGS. 47/1 and FIG. 47/2 all of the generated single domain cross-species specific bispecific single chain antibody constructs revealed cytotoxic activity against human EGFR positive target cells elicited by human CD8+ cells and macaque EGFR positive target cells elicited by the macaque T cell line 4119LnPx. A bispecific single chain antibody with different target specificity was used as negative control.

### 25 Generation of Cross-Species Specific Bispecific Single Chain Molecules Comprising One or Two Single-Domain Antibody Binders

### 25 A) Generation of Cross-Species Specific Single Domain Antibodies Binding to the N-Terminal Amino Acids 1-27 of CD3Epsilon of Man and Different Non-Chimpanzee Primates

### 25 A1) Preparation of Peptide Conjugates of the N-Terminal Amino Acids 1-27 of CD3Epsilon of Man to KLH and BSA for Immunization

[0522] 18 mg of a lyophilized peptide of the sequence acetyl-QDGNEEMGGITQTPYKVSISGTTVILTC (the additional amino acid “C” at the C-terminal position is added for coupling the 1-27 amino acid construct to e.g. KLH; SEQ ID NO 425) obtained by peptide synthesis according to standard protocols was dissolved in Dimethylformamide (DMF) and then diluted in phosphate buffered saline with 1 mM ethylenediaminetetraacetic acid (PBS/EDTA) resulting in a final concentration of 10% DMF to keep the peptide dissolved. This peptide solution was applied onto a Reduce-Imm™ Reducing Column (Pierce, Rockford Ill.). Activation and washing of the column as well as all subsequent steps were performed according to the protocol of the manufacturer. The peptide solution was applied to the column and eluted resulting in the reductive cleavage of the disulphide bond between the C-terminal cysteines of two peptides generating a free cysteine on every peptide. One half of the reduced peptide solution was mixed with 6 mg of maleimide activated bovine serum albumin BSA (Pierce, Rockford Ill.). The remaining peptide solution was mixed with 6 mg of maleimide activated keyhole limpet hemocyanin KLH (Pierce, Rockford Ill.). Conjugation was performed for 2 hours at room temperature under agitation and protection from light. Afterwards both conjugates were dialyzed three times against PBS according to standard protocols to achieve a physiological formulation.

25 A2) Immunization of Camelids Using the N-Terminus of CD3 Epsilon Separated from its Native CD3-Context by Fusion to a Heterologous Soluble Protein as Well as Conjugation to KLH

[0523] 1 to 8 years old Alpaca/Llama crossings were immunized with the CD3epsilon-Fc fusion protein carrying the most N-terminal amino acids 1-27 of the mature CD3epsilon chain (1-27 CD3-Fc) of man, the CD3epsilon-Fc fusion protein carrying the most N-terminal amino acids 1-27 of the mature CD3epsilon chain (1-27 CD3-Fc) of saimiri sciureus, a peptide-BSA conjugate of the most N-terminal amino acids 1-27 of the mature CD3epsilon chain (1-27 CD3-Fc) of man and a peptide-KLH conjugate of the most N-terminal amino acids 1-27 of the mature CD3epsilon chain (1-27 CD3-Fc) of man all as described above. To this end for each animal 500 μg of a 1:1 mixture of the two 1-27 CD3-Fc fusion proteins in a total volume of 2 ml PBS were mixed with 1 ml complete Freund's adjuvant and injected subcutaneously. The animals received booster immunizations after 28 and 42 days and optionally also after 56, 70 and 84 days. The first booster immunization was performed with 500 μg of a 1:1 mixture of the two 1-27 CD3-Fc fusion proteins in a total volume of 2 ml PBS mixed with 1 ml incomplete Freund's adjuvant and injected subcutaneously. The second and all following booster immunizations were performed alternately with 500 μg of peptide-KLH conjugate and peptide-BSA conjugate described above diluted with PBS to a final volume of 2 ml mixed with 1 ml incomplete Freund's adjuvant and injected subcutaneously.

[0524] 52 days after the first immunization, blood samples were taken and antibody serum titers against the CD3-positive human T cell line HPBaII and the macaque CD3-positive T cell line 4119LnPx (kindly provided by Prof Fickenscher, Hygiene Institute, Virology, Erlangen-Nuernberg; published in Knappe A, et al., and Fickenscher H., Blood 2000, 95, 3256-61) were tested in flow cytometry according to standard protocols. To this end 200.000 cells of the respective cell lines were incubated for 30 min on ice with 50 μl of serum of the immunized animals diluted 1:1000 in PBS with 2% FCS. The cells were washed twice in PBS with 2% FCS and binding of serum antibodies was detected with a FITC conjugated Goat anti-Llama IgG-H&L Antibody (Bethyl Laboratories Inc., Catalog No. A160-100F) diluted 1:100 in 50 μl PBS with 2% FCS. Serum of the animals obtained prior to immunization was used as a negative control.

[0525] Flow cytometry was performed on a FACS-Calibur apparatus, the CellQuest software was used to acquire and analyze the data (Becton Dickinson biosciences, Heidelberg). FACS staining and measuring of the fluorescence intensity were performed as described in Current Protocols in Immunology (Coligan, Kruisbeek, Margulies, Shevach and Strober, Wiley-Interscience, 2002).

[0526] Reactivity to the CD3-positive human T cell line HPBaII and the CD3-positive macaque T cell line 4119LnPx of a serum sample of one exemplary animal obtained 52 days after the first immunization was clearly detectable as shown in FIG. 48.

### 25 A3) Generation of an Immune Camelid Single Domain Antibody Library: Construction of an Antibody Library and Phage Display

[0527] Hundred milliliter of peripheral blood were obtained from each of three animals with antigen-positive serum titers. Peripheral blood mononuclear cells (PBMCs) were isolated by a ficoll-gradient according to standard methods. Total RNA was isolated from the PBMCs using the RNeasy® Midi Kit (QIAGEN) following the manufacturer's instructions. cDNA was synthesized according to standard methods (Sambrook, Cold Spring Harbor Laboratory Press 1989, Second Edition).

[0528] For the isolation of V-region DNA, RT-PCR was carried out using a specific primer set consisting of the 5′ primers:

5′-VHHa-XhoI:

(SEQ ID NO 408)

5′-CTG ACG CTC GAG GAG GTG CAG CTG GTG GAG TCT
GG-3′,
5′-VHHb-XhoI:

SEQ ID NO 409)

5′-CTG ACG CTC GAG CAG GTR CAG CTG GTG GAG TCT
GG-3′
5′-VHHc-XhoI:

(SEQ ID NO 410)

5′-CTG ACG CTC GAG CAG GTA AAG CTG GAG GAG TCT
GG-3′
5′-VHHd-XhoI:

(SEQ ID NO 411)

5′-CTG ACG CTC GAG GAT GTG CAG CTG GTG GAG TCT
GG-3′
5′-VHHe-XhoI:

(SEQ ID NO 412)

5′-CTG ACG CTC GAG GCC GTG CAG CTG GTG GAT TCT
GG-3′
5′-VHHf-XhoI:

(SEQ ID NO 413)

5′-CTG ACG CTC GAG GCG GTG CAG CTG GTG GAG TCT
GG-3′
5′-VHH-LP-A-XhoI:

(SEQ ID NO 414)

5′-CTG ACG CTC GAG GAG GTG CAG CTG CAG GCG TCT
G-3′
5′-VHH-LP-B-XhoI:

(SEQ ID NO 415)

5′-CTG ACG CTC GAG GAT GTS CAG CTG CAG GCG TCT
G-3′
5′-VHH-LX-I-XhoI:

(SEQ ID NO 416)

5′-CTG ACG CTC GAG CAG GTG CAG CTG GTG CAG
TCTGG-3′
5′-VHH-LX-II-XhoI:

(SEQ ID NO 417)

5′-CTG ACG CTC GAG CAG GTC ACC TTG AAG GAG
TCTGG-3′
5′-VHH-LX-III-XhoI:

(SEQ ID NO 418)

5′-CTG ACG CTC GAG CAG GTG CAG CTG CAG GAG
TCGGG-3′
5′-VHH-LG-1-XhoI:

(SEQ ID NO 419)

5′-CTG ACG CTC GAG CTG CAG CAG TCT GGG GGA
GG-3′

and of the 3′-primers:

3′-VHHG2-BsiWI-SpeI:

(SEQ ID NO 420)

5′-CTG ACG ACT AGT CGT ACG TTG GGG TAT CTT GGG
TTC TG-3′
3′-VHHG3-BsiWI-SpeI:

(SEQ ID NO 421)

5′-CTG ACG ACT AGT CGT ACG TAC TTC ATT CGT TCC
TGA VGA G-3′
3′-VHH-LP-G2a-BsiWI-SpeI:

(SEQ ID NO 422)

5′-CTG ACG ACT AGT CGT ACG TTG TGG TTT TGG
TGT CTT GGG TTC-3′
3′-VHH-LP-dirA-BsiWI-SpeI:

(SEQ ID NO 423)

5′-CTG ACG ACT AGT CGT ACG TGA GGA GAC GGT
GAC CTG GGT CC-3′
3′-VHH-LG-dir1-BsiWI-SpeI:

(SEQ ID NO 424)

5′-CTG ACG ACT AGT CGT ACG GGT GAC CTG GGT
CCC CTG GC-3′

[0529] The primers chosen for PCR amplification gave rise to 5′-XhoI and 3′-SpeI recognition sites for the V chain fragments. Per PCR reaction, one specific 5′-primer was combined with one specific 3′-primer. The number of different PCR reactions was determined by the number of possible combinations of 5′- and 3′-primers. The following PCR-program was used for amplification: Denaturation at 94° C. for 15 seconds, primer annealing at 52° C. for 50 seconds and primer extension at 72° C. for 90 seconds were performed over 40 cycles, followed by final extension at 72° C. for 10 minutes. DNA V-fragments were then isolated according to standard protocols. 300 ng of the V chain fragments (XhoI-SpeI digested) were ligated with 1400 ng of the phagemid pComb3H5Bhis (XhoI-SpeI digested; large fragment). The resulting antibody library was then transformed into 300 ul of electrocompetent Escherichia coli XL1 Blue cells by electroporation (2.5 kV, 0.2 cm gap cuvette, 25 uFD, 200 Ohm, Biorad gene-pulser) resulting in a library size of more than 10E7 independent clones. After one hour of phenotype expression and slow adaptation to carbenicillin, the E. coli cells containing the antibody library were transferred into SB-Carbenicillin (50 ug/mL) selection medium. The E. coli cells containing the antibody library were then infected with an infectious dose of 10E12 particles of helper phage VCSM13 resulting in the production and secretion of filamentous M13 phage. The resulting library comprises phage particles, which contain single stranded pComb3H5BHis-DNA encoding a camelid V-fragment and display the corresponding V-protein as a translational fusion to phage coat protein III. This pool of phages displaying the antibody library was later used for the selection of antigen binding entities.

### 25 A4) Phage Display Based Selection of CD3-Specific Single-Domain Binders

[0530] The phage library carrying the cloned V-repertoire was harvested from the respective culture supernatant by PEG8000/NaCl precipitation and centrifugation. Approximately 10E11 to 10E12 scFv phage particles were resuspended in 0.4 ml of PBS/0.1% BSA and incubated with 10E5 to 10E7 HPBaII cells (a CD3-positive human T-cell line) for 1 hour on ice under slow agitation. These Jurkat cells were grown beforehand in RPMI medium enriched with fetal calf serum (10%), glutamine and penicillin/streptomycin, harvested by centrifugation, washed in PBS and resuspended in PBS/1% FCS (containing Na Azide). Phage particles which do not specifically bind to the Jurkat cells via the displayed V domain were eliminated by up to five washing steps with PBS/1% FCS (containing Na Azide). After washing, specifically bound phages were eluted from the cells by resuspending the cells in HCl-glycine pH 2.2 (10 min incubation with subsequent vortexing) and after neutralization with 2 M Tris pH 12, the eluate was used for infection of a fresh uninfected E. coli XL1 Blue culture (OD600 >0.5). The E. coli culture containing E. coli cells successfully transduced with a phagemid copy, encoding a V-fragment, were again selected for carbenicillin resistance and subsequently infected with VCMS 13 helper phage to start the second round of antibody display and in vitro selection. A total of 4 to 5 rounds of selections were carried out. Every second round of selection was performed using macaque T cell line 4119LnPx (kindly provided by Prof Fickenscher, Hygiene Institute, Virology, Erlangen-Nuernberg; published in Knappe A, et al., and Fickenscher H., Blood 2000, 95, 3256-61) instead of Jurkat cells.

### 25 A5) Screening for CD3-Specific Single-Domain Binders

[0531] Plasmid DNA corresponding to 4 and 5 rounds of panning was isolated from E. coli cultures after selection. For the production of soluble V protein, V DNA fragments were excised from the plasmids (XhoI-SpeI). These fragments were cloned via the same restriction sites into the plasmid pComb3H5BFlag/His differing from the original pComb3H5BHis in that the expression construct (i.e. V domain) includes a Flag-tag (TGD YKDDDDK) at ot's C-terminus before the His6-tag and that phage protein III/N2 domain and protein III/CT had been deleted. After ligation, each pool (different rounds of panning) of plasmid DNA was transformed into 100 μl heat shock competent E. coli TG1 or XLI blue and plated onto carbenicillin LB-agar. Single colonies were picked into 100 ul of LB carb (50 ug/ml).

[0532] E. coli transformed with pComb3H₅BHis containing a V-segment produce soluble V domains in sufficient amounts after excision of the gene III fragment and induction with 1 mM IPTG. Due to a suitable signal sequence, the V-chain was exported into the periplasma where it folds into a functional conformation.

[0533] Single E. coli TG1 bacterial colonies from the transformation plates were picked for periplasmic small scale preparations and grown in SB-medium (e.g. 10 ml) supplemented with 20 mM MgCl2 and carbenicillin 50 μg/ml (and re-dissolved in PBS (e.g. 1 ml) after harvesting. By four rounds of freezing at −70° C. and thawing at 37° C., the outer membrane of the bacteria was destroyed by temperature shock and the soluble periplasmic proteins including the V domains were released into the supernatant.

[0534] After elimination of intact cells and cell-debris by centrifugation, the supernatant containing the anti-CD3 single-domain antibodies was collected and used for further examination.

### 25 A6) Identification of CD3-Specific Single-Domain Binders

[0535] Binding of the isolated single-domain antibodies to human and non-chimpanzee primate CD3 was tested by flowcytometry on the human CD3 positive T cell leukemia cell line HPB-ALL (DSMZ, Braunschweig, ACC483) and the CD3 positive macaque T cell line 4119LnPx (kindly provided by Prof Fickenscher, Hygiene Institute, Virology, Erlangen-Nuernberg; published in Knappe A, et al., and Fickenscher H., Blood 2000, 95, 3256-61).

[0536] For flow cytometry 2.5×10⁵ cells are incubated with 50 ul supernatant or with 5 μg/ml of the purified constructs in 50 μl PBS with 2% FCS. The binding of the constructs was detected with an anti-His antibody (Penta-His Antibody, BSA free, Qiagen GmbH, Hilden, FRG) at 2 μg/ml in 50 μl PBS with 2% FCS. As a second step reagent a R-Phycoerythrin-conjugated affinity purified F(ab′)2 fragment, goat anti-mouse IgG (Fc-gamma fragment specific), diluted 1:100 in 50 μl PBS with 2% FCS (Dianova, Hamburg, FRG) was used. The samples were measured on a FACSscan (BD biosciences, Heidelberg, FRG). FIG. 49 shows cross-species specific binding of anti-CD3 single domain binder CD3 3D-H11 to human and macaque T cells and no binding to CD3 negative CHO cells.

25 A7) Binding Assay of Cross-Species Specific Single Chain Antibodies to the N-Terminus of CD3Epsilon (Amino Acids 1-27) Separated from its Native CD3-Context in a Soluble Fc-Fusion Protein and Conjugated as 27mer-Petide to BSA.

[0537] Binding of crude preparations of periplasmatically expressed anti-CD3 single domain antibody CD3 3D-H11 to immobilized 1-27 CD3-Fc fusion protein and 1-27 CD3 BSA conjugate was tested in an ELISA assay. Antigen immobilization was carried out by overnight incubation of 5 μg/ml antigen in PBS at 4° C. Wells were washed with PBS containing 0.05% Tween 20 (PBS/Tween) and blocked with PBS containing 3% BSA (bovine Albumin, fraction V, Sigma-Aldrich Chemie GmbH, Taufkirchen, Germany) for 60 minutes at RT. Subsequently, wells were incubated with crude preparations of periplasmatically expressed single domain antibody as described above for 60 minutes at room temperature. After washing with PBS/Tween wells were incubated with peroxidase conjugated anti-Flag M2 antibody (Sigma-Aldrich Chemie GmbH, Taufkirchen, Germany) diluted 1:10000 in PBS with 1% BSA for 60 minutes at RT. Wells were washed with PBS/Tween and incubated with 100 μl of the SIGMAFAST OPD (OPD [o-Phenylenediamine dihydrochloride] substrate solution (Sigma-Aldrich Chemie GmbH, Taufkirchen, Germany) according to the manufacturers protocol. Color reaction was stopped with 100 μl 1 M H₂SO₄ and measured on a PowerWaveX microplate spectrophotometer (BioTek Instruments, Inc., Winooski, Vt., USA) at 490 nm and subtraction of background absorption at 620 nm. Binding of anti-CD3 single domain antibody H11 to 1-27 CD3-Fc fusion protein as well as to 1-27 CD3 BSA conjugate is shown in FIG. 50

### 25 A8) Generation of Human/Humanized Equivalents of Non-Human CD3Epsilon Specific Single-Domain Binders

[0538] The camelid V region was aligned against human antibody germline amino acid sequences. The human antibody germline VH sequence was chosen which has the closest homology to the non-human V domain and a direct alignment of the two amino acid sequences was performed. There were a number of framework residues of the non-human V domain that differ from the human VH framework regions (“different framework positions”). Some of these residues may contribute to the binding and activity of the antibody to its target.

[0539] To construct a library that contains the non-human CDRs and at every framework position that differs from the chosen human VH sequence both possibilities (the human and the non-human amino acid residue), degenerated oligonucleotides were synthesized. These oligonucleotides incorporate at the differing positions the human residue with a probability of 75% and the non-human residue with a probability of 25%. For one human V domain e.g. six of these oligonucleotides had to be synthesized that overlap in a terminal stretch of approximately 20 nucleotides. To this end every second primer was an antisense primer. Restriction sites needed for later cloning of the V region had to be avoided within the nucleotide sequence of these oligonucleotides, e.g. by means of silent (i.e. amino acid neutral) nucleotide exchange if required.

[0540] These primers may have a length of 60 to 90 nucleotides, depending on the number of primers needed to span over the whole V sequence.

[0541] These e.g. six primers were mixed in equal amounts (e.g. 1 μl of each primer (primer stocks 20 to 100 μM) to a 20 μl PCR reaction) and added to a PCR mix consisting of PCR buffer, nucleotides and Taq polymerase. This mix was incubated at 94° C. for 3 minutes, 65° C. for 1 minute, 62° C. for 1 minute, 59° C. for 1 minute, 56° C. for 1 minute, 52° C. for 1 minute, 50° C. for 1 minute and at 72° C. for 10 minutes in a PCR cycler. Subsequently the product was run in an agarose gel electrophoresis and the product of a size from 200 to 400 isolated from the gel according to standard methods.

[0542] This PCR product was then used as a template for a standard PCR reaction using primers that incorporate N-terminal and C-terminal suitable cloning restriction sites. The DNA fragment of the correct size (for a V domain approximately 350 nucleotides) was isolated by agarose gel electrophoresis according to standard methods. In this way sufficient V domain DNA fragment was amplified. This V domain DNA fragment contained a pool of human-like V domains differing from each other by the number of human and non-human residues at the framework positions which originally differed between the human and the non-human V region.

[0543] The pool of human-like V domains was then cloned into the phage display vector pComb3H5Bhis to form a library of functional V domains from which—after display on filamentous phage—anti-CD3 binders were selected, screened, identified and confirmed as described above for the parental non-human (camelid) anti-CD3 V domain. Single clones were then analyzed for favorable properties and amino acid sequence. Those V domains which were closest in amino acid sequence homology to human germline V-segments are preferred.

[0544] Anti-CD3 single-domain binders are converted into recombinant bispecific single chain antibodies and further characterized as follows.

### 25 B) Generation and Characterization of Cross-Species Specific Bispecific Single Chain Molecules Comprising One or Two Single-Domain Antibody Binders

### 25 B1) Construction and Expression of Bispecific Single Chain Molecules Comprising One or Two Single-Domain Antibody Binders

[0545] Anti-CD3 single-domain binders are converted into recombinant bispecific single chain antibodies by joining them via a Gly4Ser1-linker with a target antigen specific single domain (V) or scFv-binder (VH-VL or VL-VH) to result in constructs with the following arrangements of three or two domains: VH_{Target}-(Gly₄Serₜ)₃-VL_{Target}-Gly₄Ser₁-V_{CD3}, or V_{Target}-Gly₄Ser₁-V_{CD3}. Alternatively, further constructs with different domain arrangements like V_{CD3}-Gly₄Ser₁-VH_{Target}-(Gly₄Ser₁)₃-VL_{Target} or V_{cD3}-Gly₄Ser₁-V_{Target} or constructs using a scFv-binder in VL-VH instead of VH-VL orientation can be generated according to standard protocols. For expression in CHO cells the coding sequences of (i) an N-terminal immunoglobulin heavy chain leader comprising a start codon embedded within a Kozak consensus sequence and (ii) a C-terminal His6-tag followed by a stop codon are both attached in frame to the nucleotide sequence encoding the bispecific single chain antibodies prior to insertion of the resulting DNA-fragment as obtained by gene synthesis into the multiple cloning site of the expression vector pEF-DHFR (Raum et al. Cancer Immunol Immunother 50 (2001) 141-150). A clone with sequence-verified nucleotide sequence is transfected into DHFR deficient CHO cells for eukaryotic expression of the construct. Eukaryotic protein expression in DHFR deficient CHO cells is performed as described by Kaufmann R. J. (1990) Methods Enzymol. 185, 537-566. Gene amplification of the construct is induced by increasing concentrations of methotrexate (MTX) to a final concentration of up to 20 nM MTX.

### 25 B2) Production and Purification of Single Domain Bispecific Single Chain Antibody Molecules

[0546] After two passages of stationary culture CHO cells expressing single domain bispecific single chain antibody molecules are grown in roller bottles with nucleoside-free HyQ PF CHO liquid soy medium (with 4.0 mM L-Glutamine with 0.1% Pluronic F-68; HyClone) for 7 days before harvest. The cells are removed by centrifugation and the supernatant containing the expressed protein is stored at −20° C. Transfection is performed with 293fectin reagent (Invitrogen, #12347-019) according to the manufacturer's protocol.

[0547] Äkta® Explorer System (GE Health Systems) and Unicorn® Software are used for chromatography. Immobilized metal affinity chromatography (“IMAC”) is performed using a Fractogel EMD chelate® (Merck) which is loaded with ZnCl2 according to the protocol provided by the manufacturer. The column is equilibrated with buffer A (20 mM sodium phosphate buffer pH 7.2, 0.1 M NaCl) and the cell culture supernatant (500 ml) is applied to the column (10 ml) at a flow rate of 3 ml/min. The column is washed with buffer A to remove unbound sample. Bound protein is eluted using a two step gradient of buffer B (20 mM sodium phosphate buffer pH 7.2, 0.1 M NaCl, 0.5 M Imidazol) according as follows:

Step 1: 20% buffer B in 6 column volumes
Step 2: 100% buffer B in 6 column volumes

[0548] Eluted protein fractions from step 2 are pooled for further purification. All chemicals can be used in research grade and purchased from Sigma (Deisenhofen) or Merck (Darmstadt).

[0549] Gel filtration chromatography is performed on a HiLoad 16/60 Superdex 200 prep grade column (GE/Amersham) equilibrated with Equi-buffer (25 mM Citrat, 200 mM Lysin, 5% Glycerol, pH 7.2). Eluted protein samples (flow rate 1 ml/min) are subjected to standard SDS-PAGE and Western Blot for detection. Prior to purification, the column is calibrated for molecular weight determination (molecular weight marker kit, Sigma MW GF-200). Protein concentrations are determined using OD280 nm.

[0550] Purified bispecific single chain antibody protein is analyzed in SDS PAGE under reducing conditions performed with pre-cast 4-12% Bis Tris gels (Invitrogen). Sample preparation and application are performed according to the protocol provided by the manufacturer. The molecular weight is determined with MultiMark protein standard (Invitrogen). The gel is stained with colloidal Coomassie (Invitrogen protocol). The purity of the isolated protein usually is >95% as determined by SDS-PAGE.

[0551] Western Blot is performed using an Optitran® BA-S83 membrane and the Invitrogen Blot Module according to the protocol provided by the manufacturer. For detection an anti-His Tag-antibody (Penta His, Qiagen) and Goat-anti-mouse Ig labeled with alkaline phosphatase (AP) (Sigma) are used; BCIP/NBT (Sigma) is used as substrate.

### 25 B3) Flow Cytometric Binding Analysis of Single Domain Bispecific Single Chain Antibody Molecules

[0552] In order to test the functionality of the single domain cross-species specific bispecific antibody constructs with regard to binding capability to human and macaque target antigen and CD3, respectively, a FACS analysis is performed. For this purpose CHO cells transfected with the human (and optionally with the macaque) target antigen, the human CD3 positive T cell leukemia cell line Jurkat (DSMZ, Braunschweig, ACC 282) and the macaque T cell line 4119LnPx (kindly provided by Prof Fickenscher, Hygiene Institute, Virology, Erlangen-Nuernberg; published in Knappe A, et al., and Fickenscher H., Blood 2000, 95, 3256-61) are used. 200.000 cells of the respective cell population are incubated for 30 min on ice with 50 μl of the purified protein of the cross-species specific bispecific antibody constructs (2 μg/ml). Alternatively, the cell culture supernatant of CHO cells expressing the bispecific constructs can be used. The cells are washed twice in PBS and binding of the construct is detected with a murine Penta His antibody (Qiagen; diluted 1:20 in 50 μl PBS with 2% FCS). After washing, bound anti His antibodies are detected with an Fc gamma-specific antibody (Dianova) conjugated to phycoerythrin, diluted 1:100 in PBS with 2% FCS. Fresh culture medium is used as a negative control.

[0553] Flow cytometry is performed on a FACS-Calibur apparatus, the CellQuest software is used to acquire and analyze the data (Becton Dickinson biosciences, Heidelberg). FACS staining and measuring of the fluorescence intensity are performed as described in Current Protocols in Immunology (Coligan, Kruisbeek, Margulies, Shevach and Strober, Wiley-Interscience, 2002).

### 25. B4) Cytotoxic Activity of Single Domain Bispecific Single Chain Antibody Molecules

[0554] Bioactivity of the generated single domain bispecific single chain antibodies is analyzed by chromium 51 (⁵¹Cr) release in vitro cytotoxicity assays using target antigen transfected CHO cells and—as effector cells—stimulated human CD8 positive T cells and the macaque T cell line 4119LnPx.

[0555] Stimulated CD8+ T cells are obtained as follows:

A Petri dish (145 mm diameter, Greiner) is pre-coated with a commercially available anti-CD3 specific antibody in a final concentration of 1 μg/ml for 1 hour at 37° C. Unbound protein is removed by one washing step with PBS. The fresh PBMC's are isolated from peripheral blood (30-50 ml human blood) by Ficoll gradient centrifugation according to standard protocols. 3-5×10⁷ PBMCs are added to the precoated petri dish in 120 ml of RPMI 1640/10% FCS/IL-2 20 U/ml (Proleukin, Chiron) and stimulated for 2 days. At the third day the cells are collected, washed once with RPMI 1640. IL-2 is added to a final concentration of 20 U/ml and cultivated again for one day. CD8+ cytotoxic T lymphocytes (CTLs) are isolated by depletion of CD4+ T cells and CD56+ NK cells.

[0556] Target cells are washed twice with PBS and labeled with 11.1 MBq ⁵¹Cr in a final volume of 100 μl RPMI with 50% FCS for 45 minutes at 37° C. Subsequently the labeled target cells are washed 3 times with 5 ml RPMI and then used in the cytotoxicity assay. The assay is performed in a 96 well plate in a total volume of 250 μl supplemented RPMI (as above) with an E:T ratio of 10:1. 1 μg/ml of the cross-species specific bispecific single chain antibody molecules and 20 threefold dilutions thereof are applied. Alternatively cell culture supernatant of CHO cell expressing the bispecific construct can be serially diluted in 1:2 steps. The assay duration is 18 hours and the cytotoxicity is measured as relative values of released chromium in the supernatant related to the difference of maximum lysis (addition of Triton-X) and spontaneous lysis (without effector cells). All measurements are usually done in quadruplicates. Measurement of released chromium activity in the supernatants is performed with a Wizard 3″ gammacounter (Perkin Elmer Life Sciences GmbH, Köln, Germany). Analysis of the experimental data is performed with Prism 4 for Windows (version 4.02, GraphPad Software Inc., San Diego, Calif., USA). Sigmoidal dose response curves typically have R² values >0.90 as determined by the software. EC₅₀ values calculated by the analysis program are used for comparison of bioactivity. Only those constructs showing potent induction of T cell cytotoxicity against target cells are selected for further use.

| | | | | |
|---|---|---|---|---|
| SEQ | | | | |
| ID | | | | |
| NO. | DESIGNATION | SOURCE | TYPE | SEQUENCE |

| | | | | |
|---|---|---|---|---|
| 1. | Human | human | aa | QDGNEEMGGITQTPYKVSISGTTVILTCPQYPGSEILWQHNDKNIGGDEDDKNIGSDEDHLSLKE |
| | CD3ε | | | FSELEQSGYYVCYPRGSKPEDANFYLYLRARVCENCMEMD |
| | extracellular | | | |
| | domain | | | |
| 2. | Human CD3ε | human | aa | QDGNEEMGGITQTPYKVSISGTTVILT |
| | 1-27 | | | |
| 3. | Callithrix | Callithrix | aa | QDGNEEMGDTTQNPYKVSISGTTVTLTCPRYDGHEIKWLVNSQNKEGHEDHLLLEDFSEMEQSGY |
| | jacchus CD3ε | jacchus | | YACLSKETPAEEASHYLYLKARVCENCVEVD |
| | extracellular | | | |
| | domain | | | |
| 4. | Callithrix | Callithrix | aa | QDGNEEMGDTTQNPYKVSISGTTVTLT |
| | jacchus CD3ε | jacchus | | |
| | 1-27 | | | |
| 5. | Saguinus | Saguinus | aa | QDGNEEMGDTTQNPYKVSISGTTVTLTCPRYDGHEIKWLVNSQNKEGHEDHLLLEDFSEMEQSGY |
| | oedipus CD3ε | oedipus | | YACLSKETPAEEASHYLYLKARVCENCVEVD |
| | extracellular | | | |
| | domain | | | |
| 6. | Saguinus | Saguinus | aa | QDGNEEMGDTTQNPYKVSISGTTVTLT |
| | oedipus | oedipus | | |
| | CD3ε 1-27 | | | |
| 7. | Saimiri | Saimiri | aa | QDGNEEIGDTTQNPYKVSISGTTVTLTCPRYDGQEIKWLVNDQNKEGHEDHLLLEDFSEMEQSGY |
| | sciureus CD3ε | sciureus | | YACLSKETPTEEASHYLYLKARVCENCVEVD |
| | extracellular | | | |
| | domain | | | |
| 8. | Saimiri | Saimiri | aa | QDGNEEIGDTTQNPYKVSISGTTVTLT |
| | sciureus | sciureus | | |
| | CD3ε 1-27 | | | |
| 9. | CDR-L1 of F6A | artificial | aa | GSSTGAVTSGYYPN |
| 10. | CDR-L2 of F6A | artificial | aa | GTKFLAP |
| 11. | CDR-L3 of F6A | artificial | aa | ALWYSNRWV |
| 12. | CDR-H1 of F6A | artificial | aa | IYAMN |
| 13. | CDR-H2 of F6A | artificial | aa | RIRSKYNNYATYYADSVKS |
| 14. | CDR-H3 of F6A | artificial | aa | HGNFGNSYVSFFAY |
| 15. | VH of F6A | artificial | aa | EVQLVESGGGLVQPGGSLKLSCAASGFTFNIYAMNWVRQAPGKGLEWVARIRSKYNNYATYYADS |
| | | | | VKSRFTISRDDSKNTAYLQMNNLKTEDTAVYYCVRHGNFGNSYVSFFAYWGQGTLVTVSS |
| 16. | VH of F6A | artificial | nt | GAGGTGCAGCTGGTCGAGTCTGGAGGAGGATTGGTGCAGCCTGGAGGGTCATTGAAACTCTCATG |
| | | | | TGCAGCCTCTGGATTCACCTTCAATATCTACGCCATGAACTGGGTCCGCCAGGCTCCAGGAAAGG |
| | | | | GTTTGGAATGGGTTGCTCGCATAAGAAGTAAATATAATAATTATGCAACATATTATGCCGATTCA |
| | | | | GTGAAAAGCAGGTTCACCATCTCCAGAGATGATTCAAAAAACACTGCCTATCTACAAATGAACAA |
| | | | | CTTGAAAACTGAGGACACTGCCGTGTACTACTGTGTGAGACATGGGAACTTCGGTAATAGCTACG |
| | | | | TATCCTTCTTCGCTTACTGGGGCCAAGGGACTCTGGTCACCGTCTCCTCA |
| 17. | VL of F6A | artificial | aa | QTVVTQEPSLTVSPGGTVTLTCGSSTGAVTSGYYPNWVQQKPGQAPRGLIGGTKFLAPGTPARFS |
| | | | | GSLLGGKAALTLSGVQPEDEAEYYCALWYSNRWVFGGGTKLTVL |
| 18. | VL of F6A | artificial | nt | CAGACTGTTGTGACTCAGGAACCTTCACTCACCGTATCACCTGGTGGAACAGTCACACTCACTTG |
| | | | | TGGCTCCTCGACTGGGGCTGTTACATCTGGCTACTACCCAAACTGGGTCCAACAAAAACCAGGTC |
| | | | | AGGCACCCCGTGGTCTAATAGGTGGGACTAAGTTCCTCGCCCCCGGTACTCCTGCCAGATTCTCA |
| | | | | GGCTCCCTGCTTGGAGGCAAGGCTGCCCTCACCCTCTCAGGGGTACAGCCAGAGGATGAGGCAGA |
| | | | | ATATTACTGTGCTCTATGGTACAGCAACCGCTGGGTGTTCGGTGGAGGAACCAAACTGACTGTCC |
| | | | | TA |
| 19. | VH-P of F6A | artificial | aa | EVQLLESGGGLVQPGGSLKLSCAASGFTFNIYAMNWVRQAPGKGLEWVARIRSKYNNYATYYADS |
| | | | | VKSRFTISRDDSKNTAYLQMNNLKTEDTAVYYCVRHGNFGNSYVSFFAYWGQGTLVTVSS |
| 20. | VH-P of F6A | artificial | nt | GAGGTGCAGCTGCTCGAGTCTGGAGGAGGATTGGTGCAGCCTGGAGGGTCATTGAAACTCTCATG |
| | | | | TGCAGCCTCTGGATTCACCTTCAATATCTACGCCATGAACTGGGTCCGCCAGGCTCCAGGAAAGG |
| | | | | GTTTGGAATGGGTTGCTCGCATAAGAAGTAAATATAATAATTATGCAACATATTATGCCGATTCA |
| | | | | GTGAAAAGCAGGTTCACCATCTCCAGAGATGATTCAAAAAACACTGCCTATCTACAAATGAACAA |
| | | | | CTTGAAAACTGAGGACACTGCCGTGTACTACTGTGTGAGACATGGGAACTTCGGTAATAGCTACG |
| | | | | TATCCTTCTTCGCTTACTGGGGCCAAGGGACTCTGGTCACCGTCTCCTCA |
| 21. | VL-P of F6A | artificial | aa | ELVVTQEPSLTVSPGGTVTLTCGSSTGAVTSGYYPNWVQQKPGQAPRGLIGGTKFLAPGTPARFS |
| | | | | GSLLGGKAALTLSGVQPEDEAEYYCALWYSNRWVFGGGTKLTVL |
| 22. | VL-P of F6A | artificial | nt | GAGCTCGTTGTGACTCAGGAACCTTCACTCACCGTATCACCTGGTGGAACAGTCACACTCACTTG |
| | | | | TGGCTCCTCGACTGGGGCTGTTACATCTGGCTACTACCCAAACTGGGTCCAACAAAAACCAGGTC |
| | | | | AGGCACCCCGTGGTCTAATAGGTGGGACTAAGTTCCTCGCCCCCGGTACTCCTGCCAGATTCTCA |
| | | | | GGCTCCCTGCTTGGAGGCAAGGCTGCCCTCACCCTCTCAGGGGTACAGCCAGAGGATGAGGCAGA |
| | | | | ATATTACTGTGCTCTATGGTACAGCAACCGCTGGGTGTTCGGTGGAGGAACCAAACTGACTGTCC |
| | | | | TA |
| 23. | VH-VL of F6A | artificial | aa | EVQLVESGGGLVQPGGSLKLSCAASGFTFNIYAMNWVRQAPGKGLEWVARIRSKYNNYATYYADS |
| | | | | VKSRFTISRDDSKNTAYLQMNNLKTEDTAVYYCVRHGNFGNSYVSFFAYWGQGTLVTVSSGGGGS |
| | | | | GGGGSGGGGSQTVVTQEPSLTVSPGGTVTLTCGSSTGAVTSGYYPNWVQQKPGQAPRGLIGGTKF |
| | | | | LAPGTPARFSGSLLGGKAALTLSGVQPEDEAEYYCALWYSNRWVFGGGTKLTVL |
| 24. | VH-VL of F6A | artificial | nt | GAGGTGCAGCTGGTCGAGTCTGGAGGAGGATTGGTGCAGCCTGGAGGGTCATTGAAACTCTCATG |
| | | | | TGCAGCCTCTGGATTCACCTTCAATATCTACGCCATGAACTGGGTCCGCCAGGCTCCAGGAAAGG |
| | | | | GTTTGGAATGGGTTGCTCGCATAAGAAGTAAATATAATAATTATGCAACATATTATGCCGATTCA |
| | | | | GTGAAAAGCAGGTTCACCATCTCCAGAGATGATTCAAAAAACACTGCCTATCTACAAATGAACAA |
| | | | | CTTGAAAACTGAGGACACTGCCGTGTACTACTGTGTGAGACATGGGAACTTCGGTAATAGCTACG |
| | | | | TATCCTTCTTCGCTTACTGGGGCCAAGGGACTCTGGTCACCGTCTCCTCAGGTGGTGGTGGTTCT |
| | | | | GGCGGCGGCGGCTCCGGTGGTGGTGGTTCTCAGACTGTTGTGACTCAGGAACCTTCACTCACCGT |
| | | | | ATCACCTGGTGGAACAGTCACACTCACTTGTGGCTCCTCGACTGGGGCTGTTACATCTGGCTACT |
| | | | | ACCCAAACTGGGTCCAACAAAAACCAGGTCAGGCACCCCGTGGTCTAATAGGTGGGACTAAGTTC |
| | | | | CTCGCCCCCGGTACTCCTGCCAGATTCTCAGGCTCCCTGCTTGGAGGCAAGGCTGCCCTCACCCT |
| | | | | CTCAGGGGTACAGCCAGAGGATGAGGCAGAATATTACTGTGCTCTATGGTACAGCAACCGCTGGG |
| | | | | TGTTCGGTGGAGGAACCAAACTGACTGTCCTA |
| 25. | VH-VL-P of F6A | artificial | aa | EVQLLESGGGLVQPGGSLKLSCAASGFTFNIYAMNWVRQAPGKGLEWVARIRSKYNNYATYYADS |
| | | | | VKSRFTISRDDSKNTAYLQMNNLKTEDTAVYYCVRHGNFGNSYVSFFAYWGQGTLVTVSSGGGGS |
| | | | | GGGGSGGGGSELVVTQEPSLTVSPGGTVTLTCGSSTGAVTSGYYPNWVQQKPGQAPRGLIGGTKF |
| | | | | LAPGTPARFSGSLLGGKAALTLSGVQPEDEAEYYCALWYSNRWVFGGGTKLTVL |
| 26. | VH-VL-P of F6A | artificial | nt | GAGGTGCAGCTGCTCGAGTCTGGAGGAGGATTGGTGCAGCCTGGAGGGTCATTGAAACTCTCATG |
| | | | | TGCAGCCTCTGGATTCACCTTCAATATCTACGCCATGAACTGGGTCCGCCAGGCTCCAGGAAAGG |
| | | | | GTTTGGAATGGGTTGCTCGCATAAGAAGTAAATATAATAATTATGCAACATATTATGCCGATTCA |
| | | | | GTGAAAAGCAGGTTCACCATCTCCAGAGATGATTCAAAAAACACTGCCTATCTACAAATGAACAA |
| | | | | CTTGAAAACTGAGGACACTGCCGTGTACTACTGTGTGAGACATGGGAACTTCGGTAATAGCTACG |
| | | | | TATCCTTCTTCGCTTACTGGGGCCAAGGGACTCTGGTCACCGTCTCCTCAGGTGGTGGTGGTTCT |
| | | | | GGCGGCGGCGGCTCCGGTGGTGGTGGTTCTGAGCTCGTTGTGACTCAGGAACCTTCACTCACCGT |
| | | | | ATCACCTGGTGGAACAGTCACACTCACTTGTGGCTCCTCGACTGGGGCTGTTACATCTGGCTACT |
| | | | | ACCCAAACTGGGTCCAACAAAAACCAGGTCAGGCACCCCGTGGTCTAATAGGTGGGACTAAGTTC |
| | | | | CTCGCCCCCGGTACTCCTGCCAGATTCTCAGGCTCCCTGCTTGGAGGCAAGGCTGCCCTCACCCT |
| | | | | CTCAGGGGTACAGCCAGAGGATGAGGCAGAATATTACTGTGCTCTATGGTACAGCAACCGCTGGG |
| | | | | TGTTCGGTGGAGGAACCAAACTGACTGTCCTA |
| 27. | CDR-L1 of H2C | artificial | aa | GSSTGAVTSGYYPN |
| 28. | CDR-L2 of H2C | artificial | aa | GTKFLAP |
| 29. | CDR-L3 of H2C | artificial | aa | ALWYSNRWV |
| 30. | CDR-H1 of H2C | artificial | aa | KYAMN |
| 31. | CDR-H2 of H2C | artificial | aa | RIRSKYNNYATYYADSVKD |
| 32. | CDR-H3 of H2C | artificial | aa | HGNFGNSYISYWAY |
| 33. | VH of H2C | artificial | aa | EVQLVESGGGLVQPGGSLKLSCAASGFTFNKYAMNWVRQAPGKGLEWVARIRSKYNNYATYYADS |
| | | | | VKDRFTISRDDSKNTAYLQMNNLKTEDTAVYYCVRHGNFGNSYISYWAYWGQGTLVTVSS |
| 34. | VH of H2C | artificial | nt | GAGGTGCAGCTGGTCGAGTCTGGAGGAGGATTGGTGCAGCCTGGAGGGTCATTGAAACTCTCATG |
| | | | | TGCAGCCTCTGGATTCACCTTCAATAAGTACGCCATGAACTGGGTCCGCCAGGCTCCAGGAAAGG |
| | | | | GTTTGGAATGGGTTGCTCGCATAAGAAGTAAATATAATAATTATGCAACATATTATGCCGATTCA |
| | | | | GTGAAAGACAGGTTCACCATCTCCAGAGATGATTCAAAAAACACTGCCTATCTACAAATGAACAA |
| | | | | CTTGAAAACTGAGGACACTGCCGTGTACTACTGTGTGAGACATGGGAACTTCGGTAATAGCTACA |
| | | | | TATCCTACTGGGCTTACTGGGGCCAAGGGACTCTGGTCACCGTCTCCTCA |
| 35. | VL of H2C | artificial | aa | QTVVTQEPSLTVSPGGTVTLTCGSSTGAVTSGYYPNWVQQKPGQAPRGLIGGTKFLAPGTPARFS |
| | | | | GSLLGGKAALTLSGVQPEDEAEYYCALWYSNRWVFGGGTKLTVL |
| 36. | VL of H2C | artificial | nt | CAGACTGTTGTGACTCAGGAACCTTCACTCACCGTATCACCTGGTGGAACAGTCACACTCACTTG |
| | | | | TGGCTCCTCGACTGGGGCTGTTACATCTGGCTACTACCCAAACTGGGTCCAACAAAAACCAGGTC |
| | | | | AGGCACCCCGTGGTCTAATAGGTGGGACTAAGTTCCTCGCCCCCGGTACTCCTGCCAGATTCTCA |
| | | | | GGCTCCCTGCTTGGAGGCAAGGCTGCCCTCACCCTCTCAGGGGTACAGCCAGAGGATGAGGCAGA |
| | | | | ATATTACTGTGCTCTATGGTACAGCAACCGCTGGGTGTTCGGTGGAGGAACCAAACTGACTGTCC |
| | | | | TA |
| 37. | VH-P of H2C | artificial | aa | EVQLLESGGGLVQPGGSLKLSCAASGFTFNKYAMNWVRQAPGKGLEWVARIRSKYNNYATYYADS |
| | | | | VKDRFTISRDDSKNTAYLQMNNLKTEDTAVYYCVRHGNFGNSYISYWAYWGQGTLVTVSS |
| 38. | VH-P of H2C | artificial | nt | GAGGTGCAGCTGCTCGAGTCTGGAGGAGGATTGGTGCAGCCTGGAGGGTCATTGAAACTCTCATG |
| | | | | TGCAGCCTCTGGATTCACCTTCAATAAGTACGCCATGAACTGGGTCCGCCAGGCTCCAGGAAAGG |
| | | | | GTTTGGAATGGGTTGCTCGCATAAGAAGTAAATATAATAATTATGCAACATATTATGCCGATTCA |
| | | | | GTGAAAGACAGGTTCACCATCTCCAGAGATGATTCAAAAAACACTGCCTATCTACAAATGAACAA |
| | | | | CTTGAAAACTGAGGACACTGCCGTGTACTACTGTGTGAGACATGGGAACTTCGGTAATAGCTACA |
| | | | | TATCCTACTGGGCTTACTGGGGCCAAGGGACTCTGGTCACCGTCTCCTCA |
| 39. | VL-P of H2C | artificial | aa | ELVVTQEPSLTVSPGGTVTLTCGSSTGAVTSGYYPNWVQQKPGQAPRGLIGGTKFLAPGTPARFS |
| | | | | GSLLGGKAALTLSGVQPEDEAEYYCALWYSNRWVFGGGTKLTVL |
| 40. | VL-P of H2C | artificial | nt | GAGCTCGTTGTGACTCAGGAACCTTCACTCACCGTATCACCTGGTGGAACAGTCACACTCACTTG |
| | | | | TGGCTCCTCGACTGGGGCTGTTACATCTGGCTACTACCCAAACTGGGTCCAACAAAAACCAGGTC |
| | | | | AGGCACCCCGTGGTCTAATAGGTGGGACTAAGTTCCTCGCCCCCGGTACTCCTGCCAGATTCTCA |
| | | | | GGCTCCCTGCTTGGAGGCAAGGCTGCCCTCACCCTCTCAGGGGTACAGCCAGAGGATGAGGCAGA |
| | | | | ATATTACTGTGCTCTATGGTACAGCAACCGCTGGGTGTTCGGTGGAGGAACCAAACTGACTGTCC |
| | | | | TA |
| 41. | VH-VL of H2C | artificial | aa | EVQLVESGGGLVQPGGSLKLSCAASGFTFNKYAMNWVRQAPGKGLEWVARIRSKYNNYATYYADS |
| | | | | VKDRFTISRDDSKNTAYLQMNNLKTEDTAVYYCVRHGNFGNSYISYWAYWGQGTLVTVSSGGGGS |
| | | | | GGGGSGGGGSQTVVTQEPSLTVSPGGTVTLTCGSSTGAVTSGYYPNWVQQKPGQAPRGLIGGTKF |
| | | | | LAPGTPARFSGSLLGGKAALTLSGVQPEDEAEYYCALWYSNRWVFGGGTKLTVL |
| 42. | VH-VL of H2C | artificial | nt | GAGGTGCAGCTGGTCGAGTCTGGAGGAGGATTGGTGCAGCCTGGAGGGTCATTGAAACTCTCATG |
| | | | | TGCAGCCTCTGGATTCACCTTCAATAAGTACGCCATGAACTGGGTCCGCCAGGCTCCAGGAAAGG |
| | | | | GTTTGGAATGGGTTGCTCGCATAAGAAGTAAATATAATAATTATGCAACATATTATGCCGATTCA |
| | | | | GTGAAAGACAGGTTCACCATCTCCAGAGATGATTCAAAAAACACTGCCTATCTACAAATGAACAA |
| | | | | CTTGAAAACTGAGGACACTGCCGTGTACTACTGTGTGAGACATGGGAACTTCGGTAATAGCTACA |
| | | | | TATCCTACTGGGCTTACTGGGGCCAAGGGACTCTGGTCACCGTCTCCTCAGGTGGTGGTGGTTCT |
| | | | | GGCGGCGGCGGCTCCGGTGGTGGTGGTTCTCAGACTGTTGTGACTCAGGAACCTTCACTCACCGT |
| | | | | ATCACCTGGTGGAACAGTCACACTCACTTGTGGCTCCTCGACTGGGGCTGTTACATCTGGCTACT |
| | | | | ACCCAAACTGGGTCCAACAAAAACCAGGTCAGGCACCCCGTGGTCTAATAGGTGGGACTAAGTTC |
| | | | | CTCGCCCCCGGTACTCCTGCCAGATTCTCAGGCTCCCTGCTTGGAGGCAAGGCTGCCCTCACCCT |
| | | | | CTCAGGGGTACAGCCAGAGGATGAGGCAGAATATTACTGTGCTCTATGGTACAGCAACCGCTGGG |
| | | | | TGTTCGGTGGAGGAACCAAACTGACTGTCCTA |
| 43. | VH-VL-P of H2C | artificial | aa | EVQLLESGGGLVQPGGSLKLSCAASGFTFNKYAMNWVRQAPGKGLEWVARIRSKYNNYATYYADS |
| | | | | VKDRFTISRDDSKNTAYLQMNNLKTEDTAVYYCVRHGNFGNSYISYWAYWGQGTLVTVSSGGGGS |
| | | | | GGGGSGGGGSELVVTQEPSLTVSPGGTVTLTCGSSTGAVTSGYYPNWVQQKPGQAPRGLIGGTKF |
| | | | | LAPGTPARFSGSLLGGKAALTLSGVQPEDEAEYYCALWYSNRWVFGGGTKLTVL |
| 44. | VH-VL-P of H2C | artificial | nt | GAGGTGCAGCTGCTCGAGTCTGGAGGAGGATTGGTGCAGCCTGGAGGGTCATTGAAACTCTCATG |
| | | | | TGCAGCCTCTGGATTCACCTTCAATAAGTACGCCATGAACTGGGTCCGCCAGGCTCCAGGAAAGG |
| | | | | GTTTGGAATGGGTTGCTCGCATAAGAAGTAAATATAATAATTATGCAACATATTATGCCGATTCA |
| | | | | GTGAAAGACAGGTTCACCATCTCCAGAGATGATTCAAAAAACACTGCCTATCTACAAATGAACAA |
| | | | | CTTGAAAACTGAGGACACTGCCGTGTACTACTGTGTGAGACATGGGAACTTCGGTAATAGCTACA |
| | | | | TATCCTACTGGGCTTACTGGGGCCAAGGGACTCTGGTCACCGTCTCCTCAGGTGGTGGTGGTTCT |
| | | | | GGCGGCGGCGGCTCCGGTGGTGGTGGTTCTGAGCTCGTTGTGACTCAGGAACCTTCACTCACCGT |
| | | | | ATCACCTGGTGGAACAGTCACACTCACTTGTGGCTCCTCGACTGGGGCTGTTACATCTGGCTACT |
| | | | | ACCCAAACTGGGTCCAACAAAAACCAGGTCAGGCACCCCGTGGTCTAATAGGTGGGACTAAGTTC |
| | | | | CTCGCCCCCGGTACTCCTGCCAGATTCTCAGGCTCCCTGCTTGGAGGCAAGGCTGCCCTCACCCT |
| | | | | CTCAGGGGTACAGCCAGAGGATGAGGCAGAATATTACTGTGCTCTATGGTACAGCAACCGCTGGG |
| | | | | TGTTCGGTGGAGGAACCAAACTGACTGTCCTA |
| 45. | CDR-L1 of H1E | artificial | aa | GSSTGAVTSGYYPN |
| 46. | CDR-L2 of H1E | artificial | aa | GTKFLAP |
| 47. | CDR-L3 of H1E | artificial | aa | ALWYSNRWV |
| 48. | CDR-H1 of H1E | artificial | aa | SYAMN |
| 49. | CDR-H2 of H1E | artificial | aa | RIRSKYNNYATYYADSVKG |
| 50. | CDR-H3 of H1E | artificial | aa | HGNFGNSYLSFWAY |
| 51. | VH of H1E | artificial | aa | EVQLVESGGGLEQPGGSLKLSCAASGFTFNSYAMNWVRQAPGKGLEWVARIRSKYNNYATYYADS |
| | | | | VKGRFTISRDDSKNTAYLQMNNLKTEDTAVYYCVRHGNFGNSYLSFWAYWGQGTLVTVSS |
| 52. | VH of H1E | artificial | nt | GAGGTGCAGCTGGTCGAGTCTGGAGGAGGATTGGAGCAGCCTGGAGGGTCATTGAAACTCTCATG |
| | | | | TGCAGCCTCTGGATTCACCTTCAATTCGTACGCCATGAACTGGGTCCGCCAGGCTCCAGGAAAGG |
| | | | | GTTTGGAATGGGTTGCTCGCATAAGAAGTAAATATAATAATTATGCAACATATTATGCCGATTCA |
| | | | | GTGAAAGGGAGGTTCACCATCTCCAGAGATGATTCAAAAAACACTGCCTATCTACAAATGAACAA |
| | | | | CTTGAAAACTGAGGACACTGCCGTGTACTACTGTGTGAGACATGGGAACTTCGGTAATAGCTACC |
| | | | | TATCCTTCTGGGCTTACTGGGGCCAAGGGACTCTGGTCACCGTCTCCTC |
| 53. | VL of H1E | artificial | aa | QTVVTQEPSLTVSPGGTVTLTCGSSTGAVTSGYYPNWVQQKPGQAPRGLIGGTKFLAPGTPARFS |
| | | | | GSLLGGKAALTLSGVQPEDEAEYYCALWYSNRWVFGGGTKLTVL |
| 54. | VL of H1E | artificial | nt | CAGACTGTTGTGACTCAGGAACCTTCACTCACCGTATCACCTGGTGGAACAGTCACACTCACTTG |
| | | | | TGGCTCCTCGACTGGGGCTGTTACATCTGGCTACTACCCAAACTGGGTCCAACAAAAACCAGGTC |
| | | | | AGGCACCCCGTGGTCTAATAGGTGGGACTAAGTTCCTCGCCCCCGGTACTCCTGCCAGATTCTCA |
| | | | | GGCTCCCTGCTTGGAGGCAAGGCTGCCCTCACCCTCTCAGGGGTACAGCCAGAGGATGAGGCAGA |
| | | | | ATATTACTGTGCTCTATGGTACAGCAACCGCTGGGTGTTCGGTGGAGGAACCAAACTGACTGTCC |
| | | | | TA |
| 55. | VH-P of H1E | artificial | aa | EVQLLESGGGLEQPGGSLKLSCAASGFTFNSYAMNWVRQAPGKGLEWVARIRSKYNNYATYYADS |
| | | | | VKGRFTISRDDSKNTAYLQMNNLKTEDTAVYYCVRHGNFGNSYLSFWAYWGQGTLVTVSS |
| 56. | VH-P of H1E | artificial | nt | GAGGTGCAGCTGCTCGAGTCTGGAGGAGGATTGGAGCAGCCTGGAGGGTCATTGAAACTCTCATG |
| | | | | TGCAGCCTCTGGATTCACCTTCAATTCGTACGCCATGAACTGGGTCCGCCAGGCTCCAGGAAAGG |
| | | | | GTTTGGAATGGGTTGCTCGCATAAGAAGTAAATATAATAATTATGCAACATATTATGCCGATTCA |
| | | | | GTGAAAGGGAGGTTCACCATCTCCAGAGATGATTCAAAAAACACTGCCTATCTACAAATGAACAA |
| | | | | CTTGAAAACTGAGGACACTGCCGTGTACTACTGTGTGAGACATGGGAACTTCGGTAATAGCTACC |
| | | | | TATCCTTCTGGGCTTACTGGGGCCAAGGGACTCTGGTCACCGTCTCCTCA |
| 57. | VL-P of H1E | artificial | aa | ELVVTQEPSLTVSPGGTVTLTCGSSTGAVTSGYYPNWVQQKPGQAPRGLIGGTKFLAPGTPARFS |
| | | | | GSLLGGKAALTLSGVQPEDEAEYYCALWYSNRWVFGGGTKLTVL |
| 58. | VL-P of H1E | artificial | nt | GAGCTCGTTGTGACTCAGGAACCTTCACTCACCGTATCACCTGGTGGAACAGTCACACTCACTTG |
| | | | | TGGCTCCTCGACTGGGGCTGTTACATCTGGCTACTACCCAAACTGGGTCCAACAAAAACCAGGTC |
| | | | | AGGCACCCCGTGGTCTAATAGGTGGGACTAAGTTCCTCGCCCCCGGTACTCCTGCCAGATTCTCA |
| | | | | GGCTCCCTGCTTGGAGGCAAGGCTGCCCTCACCCTCTCAGGGGTACAGCCAGAGGATGAGGCAGA |
| | | | | ATATTACTGTGCTCTATGGTACAGCAACCGCTGGGTGTTCGGTGGAGGAACCAAACTGACTGTCC |
| | | | | TA |
| 59. | VH-VL of H1E | artificial | aa | EVQLVESGGGLEQPGGSLKLSCAASGFTFNSYAMNWVRQAPGKGLEWVARIRSKYNNYATYYADS |
| | | | | VKGRFTISRDDSKNTAYLQMNNLKTEDTAVYYCVRHGNFGNSYLSFWAYWGQGTLVTVSSGGGGS |
| | | | | GGGGSGGGGSQTVVTQEPSLTVSPGGTVTLTCGSSTGAVTSGYYPNWVQQKPGQAPRGLIGGTKF |
| | | | | LAPGTPARFSGSLLGGKAALTLSGVQPEDEAEYYCALWYSNRWVFGGGTKLTVL |
| 60. | VH-VL of H1E | artificial | nt | GAGGTGCAGCTGGTCGAGTCTGGAGGAGGATTGGAGCAGCCTGGAGGGTCATTGAAACTCTCATG |
| | | | | TGCAGCCTCTGGATTCACCTTCAATTCGTACGCCATGAACTGGGTCCGCCAGGCTCCAGGAAAGG |
| | | | | GTTTGGAATGGGTTGCTCGCATAAGAAGTAAATATAATAATTATGCAACATATTATGCCGATTCA |
| | | | | GTGAAAGGGAGGTTCACCATCTCCAGAGATGATTCAAAAAACACTGCCTATCTACAAATGAACAA |
| | | | | CTTGAAAACTGAGGACACTGCCGTGTACTACTGTGTGAGACATGGGAACTTCGGTAATAGCTACC |
| | | | | TATCCTTCTGGGCTTACTGGGGCCAAGGGACTCTGGTCACCGTCTCCTCAGGTGGTGGTGGTTCT |
| | | | | GGCGGCGGCGGCTCCGGTGGTGGTGGTTCTCAGACTGTTGTGACTCAGGAACCTTCACTCACCGT |
| | | | | ATCACCTGGTGGAACAGTCACACTCACTTGTGGCTCCTCGACTGGGGCTGTTACATCTGGCTACT |
| | | | | ACCCAAACTGGGTCCAACAAAAACCAGGTCAGGCACCCCGTGGTCTAATAGGTGGGACTAAGTTC |
| | | | | CTCGCCCCCGGTACTCCTGCCAGATTCTCAGGCTCCCTGCTTGGAGGCAAGGCTGCCCTCACCCT |
| | | | | CTCAGGGGTACAGCCAGAGGATGAGGCAGAATATTACTGTGCTCTATGGTACAGCAACCGCTGGG |
| | | | | TGTTCGGTGGAGGAACCAAACTGACTGTCCTA |
| 61. | VH-VL-P of H1E | artificial | aa | EVQLLESGGGLEQPGGSLKLSCAASGFTFNSYAMNWVRQAPGKGLEWVARIRSKYNNYATYYADS |
| | | | | VKGRFTISRDDSKNTAYLQMNNLKTEDTAVYYCVRHGNFGNSYLSFWAYWGQGTLVTVSSGGGGS |
| | | | | GGGGSGGGGSELVVTQEPSLTVSPGGTVTLTCGSSTGAVTSGYYPNWVQQKPGQAPRGLIGGTKF |
| | | | | LAPGTPARFSGSLLGGKAALTLSGVQPEDEAEYYCALWYSNRWVFGGGTKLTVL |
| 62. | VH-VL-P of H1E | artificial | nt | GAGGTGCAGCTGCTCGAGTCTGGAGGAGGATTGGAGCAGCCTGGAGGGTCATTGAAACTCTCATG |
| | | | | TGCAGCCTCTGGATTCACCTTCAATTCGTACGCCATGAACTGGGTCCGCCAGGCTCCAGGAAAGG |
| | | | | GTTTGGAATGGGTTGCTCGCATAAGAAGTAAATATAATAATTATGCAACATATTATGCCGATTCA |
| | | | | GTGAAAGGGAGGTTCACCATCTCCAGAGATGATTCAAAAAACACTGCCTATCTACAAATGAACAA |
| | | | | CTTGAAAACTGAGGACACTGCCGTGTACTACTGTGTGAGACATGGGAACTTCGGTAATAGCTACC |
| | | | | TATCCTTCTGGGCTTACTGGGGCCAAGGGACTCTGGTCACCGTCTCCTCAGGTGGTGGTGGTTCT |
| | | | | GGCGGCGGCGGCTCCGGTGGTGGTGGTTCTGAGCTCGTTGTGACTCAGGAACCTTCACTCACCGT |
| | | | | ATCACCTGGTGGAACAGTCACACTCACTTGTGGCTCCTCGACTGGGGCTGTTACATCTGGCTACT |
| | | | | ACCCAAACTGGGTCCAACAAAAACCAGGTCAGGCACCCCGTGGTCTAATAGGTGGGACTAAGTTC |
| | | | | CTCGCCCCCGGTACTCCTGCCAGATTCTCAGGCTCCCTGCTTGGAGGCAAGGCTGCCCTCACCCT |
| | | | | CTCAGGGGTACAGCCAGAGGATGAGGCAGAATATTACTGTGCTCTATGGTACAGCAACCGCTGGG |
| | | | | TGTTCGGTGGAGGAACCAAACTGACTGTCCTA |
| 63. | CDR-L1 of G4H | artificial | aa | GSSTGAVTSGYYPN |
| 64. | CDR-L2 of G4H | artificial | aa | GTKFLAP |
| 65. | CDR-L3 of G4H | artificial | aa | ALWYSNRWV |
| 66. | CDR-H1 of G4H | artificial | aa | RYAMN |
| 67. | CDR-H2 of G4H | artificial | aa | RIRSKYNNYATYYADSVKG |
| 68. | CDR-H3 of G4H | artificial | aa | HGNFGNSYLSYFAY |
| 69. | VH of G4H | artificial | aa | EVQLVESGGGLVQPGGSLKLSCAASGFTFNRYAMNWVRQAPGKGLEWVARIRSKYNNYATYYADS |
| | | | | VKGRFTISRDDSKNTAYLQMNNLKTEDTAVYYCVRHGNFGNSYLSYFAYWGQGTLVTVSS |
| 70. | VH of G4H | artificial | nt | GAGGTGCAGCTGGTCGAGTCTGGAGGAGGATTGGTGCAGCCTGGAGGGTCATTGAAACTCTCATG |
| | | | | TGCAGCCTCTGGATTCACCTTCAATCGCTACGCCATGAACTGGGTCCGCCAGGCTCCAGGAAAGG |
| | | | | GTTTGGAATGGGTTGCTCGCATAAGAAGTAAATATAATAATTATGCAACATATTATGCCGATTCA |
| | | | | GTGAAAGGGAGGTTCACCATCTCCAGAGATGATTCAAAAAACACTGCCTATCTACAAATGAACAA |
| | | | | CTTGAAAACTGAGGACACTGCCGTGTACTACTGTGTGAGACATGGGAACTTCGGTAATAGCTACT |
| | | | | TATCCTACTTCGCTTACTGGGGCCAAGGGACTCTGGTCACCGTCTCCTCA |
| 71. | VL of G4H | artificial | aa | QTVVTQEPSLTVSPGGTVTLTCGSSTGAVTSGYYPNWVQQKPGQAPRGLIGGTKFLAPGTPARFS |
| | | | | GSLLGGKAALTLSGVQPEDEAEYYCALWYSNRWVFGGGTKLTVL |
| 72. | VL of G4H | artificial | nt | CAGACTGTTGTGACTCAGGAACCTTCACTCACCGTATCACCTGGTGGAACAGTCACACTCACTTG |
| | | | | TGGCTCCTCGACTGGGGCTGTTACATCTGGCTACTACCCAAACTGGGTCCAACAAAAACCAGGTC |
| | | | | AGGCACCCCGTGGTCTAATAGGTGGGACTAAGTTCCTCGCCCCCGGTACTCCTGCCAGATTCTCA |
| | | | | GGCTCCCTGCTTGGAGGCAAGGCTGCCCTCACCCTCTCAGGGGTACAGCCAGAGGATGAGGCAGA |
| | | | | ATATTACTGTGCTCTATGGTACAGCAACCGCTGGGTGTTCGGTGGAGGAACCAAACTGACTGTCC |
| | | | | TA |
| 73. | VH-P of G4H | artificial | aa | EVQLLESGGGLVQPGGSLKLSCAASGFTFNRYAMNWVRQAPGKGLEWVARIRSKYNNYATYYADS |
| | | | | VKGRFTISRDDSKNTAYLQMNNLKTEDTAVYYCVRHGNFGNSYLSYFAYWGQGTLVTVSS |
| 74. | VH-P of G4H | artificial | nt | GAGGTGCAGCTGCTCGAGTCTGGAGGAGGATTGGTGCAGCCTGGAGGGTCATTGAAACTCTCATG |
| | | | | TGCAGCCTCTGGATTCACCTTCAATCGCTACGCCATGAACTGGGTCCGCCAGGCTCCAGGAAAGG |
| | | | | GTTTGGAATGGGTTGCTCGCATAAGAAGTAAATATAATAATTATGCAACATATTATGCCGATTCA |
| | | | | GTGAAAGGGAGGTTCACCATCTCCAGAGATGATTCAAAAAACACTGCCTATCTACAAATGAACAA |
| | | | | CTTGAAAACTGAGGACACTGCCGTGTACTACTGTGTGAGACATGGGAACTTCGGTAATAGCTACT |
| | | | | TATCCTACTTCGCTTACTGGGGCCAAGGGACTCTGGTCACCGTCTCCTCA |
| 75. | VL-P of G4H | artificial | aa | ELVVTQEPSLTVSPGGTVTLTCGSSTGAVTSGYYPNWVQQKPGQAPRGLIGGTKFLAPGTPARFS |
| | | | | GSLLGGKAALTLSGVQPEDEAEYYCALWYSNRWVFGGGTKLTVL |
| 76. | VL-P of G4H | artificial | nt | GAGCTCGTTGTGACTCAGGAACCTTCACTCACCGTATCACCTGGTGGAACAGTCACACTCACTTG |
| | | | | TGGCTCCTCGACTGGGGCTGTTACATCTGGCTACTACCCAAACTGGGTCCAACAAAAACCAGGTC |
| | | | | AGGCACCCCGTGGTCTAATAGGTGGGACTAAGTTCCTCGCCCCCGGTACTCCTGCCAGATTCTCA |
| | | | | GGCTCCCTGCTTGGAGGCAAGGCTGCCCTCACCCTCTCAGGGGTACAGCCAGAGGATGAGGCAGA |
| | | | | ATATTACTGTGCTCTATGGTACAGCAACCGCTGGGTGTTCGGTGGAGGAACCAAACTGACTGTCC |
| | | | | TA |
| 77. | VH-VL of G4H | artificial | aa | EVQLVESGGGLVQPGGSLKLSCAASGFTFNRYAMNWVRQAPGKGLEWVARIRSKYNNYATYYADS |
| | | | | VKGRFTISRDDSKNTAYLQMNNLKTEDTAVYYCVRHGNFGNSYLSYFAYWGQGTLVTVSSGGGGS |
| | | | | GGGGSGGGGSQTVVTQEPSLTVSPGGTVTLTCGSSTGAVTSGYYPNWVQQKPGQAPRGLIGGTKF |
| | | | | LAPGTPARFSGSLLGGKAALTLSGVQPEDEAEYYCALWYSNRWVFGGGTKLTVL |
| 78. | VH-VL of G4H | artificial | nt | GAGGTGCAGCTGGTCGAGTCTGGAGGAGGATTGGTGCAGCCTGGAGGGTCATTGAAACTCTCATG |
| | | | | TGCAGCCTCTGGATTCACCTTCAATCGCTACGCCATGAACTGGGTCCGCCAGGCTCCAGGAAAGG |
| | | | | GTTTGGAATGGGTTGCTCGCATAAGAAGTAAATATAATAATTATGCAACATATTATGCCGATTCA |
| | | | | GTGAAAGGGAGGTTCACCATCTCCAGAGATGATTCAAAAAACACTGCCTATCTACAAATGAACAA |
| | | | | CTTGAAAACTGAGGACACTGCCGTGTACTACTGTGTGAGACATGGGAACTTCGGTAATAGCTACT |
| | | | | TATCCTACTTCGCTTACTGGGGCCAAGGGACTCTGGTCACCGTCTCCTCAGGTGGTGGTGGTTCT |
| | | | | GGCGGCGGCGGCTCCGGTGGTGGTGGTTCTCAGACTGTTGTGACTCAGGAACCTTCACTCACCGT |
| | | | | ATCACCTGGTGGAACAGTCACACTCACTTGTGGCTCCTCGACTGGGGCTGTTACATCTGGCTACT |
| | | | | ACCCAAACTGGGTCCAACAAAAACCAGGTCAGGCACCCCGTGGTCTAATAGGTGGGACTAAGTTC |
| | | | | CTCGCCCCCGGTACTCCTGCCAGATTCTCAGGCTCCCTGCTTGGAGGCAAGGCTGCCCTCACCCT |
| | | | | CTCAGGGGTACAGCCAGAGGATGAGGCAGAATATTACTGTGCTCTATGGTACAGCAACCGCTGGG |
| | | | | TGTTCGGTGGAGGAACCAAACTGACTGTCCTA |
| 79. | VH-VL-P of G4H | artificial | aa | EVQLLESGGGLVQPGGSLKLSCAASGFTFNRYAMNWVRQAPGKGLEWVARIRSKYNNYATYYADS |
| | | | | VKGRFTISRDDSKNTAYLQMNNLKTEDTAVYYCVRHGNFGNSYLSYFAYWGQGTLVTVSSGGGGS |
| | | | | GGGGSGGGGSELVVTQEPSLTVSPGGTVTLTCGSSTGAVTSGYYPNWVQQKPGQAPRGLIGGTKF |
| | | | | LAPGTPARFSGSLLGGKAALTLSGVQPEDEAEYYCALWYSNRWVFGGGTKLTVL |
| 80. | VH-VL-P of G4H | artificial | nt | GAGGTGCAGCTGCTCGAGTCTGGAGGAGGATTGGTGCAGCCTGGAGGGTCATTGAAACTCTCATG |
| | | | | TGCAGCCTCTGGATTCACCTTCAATCGCTACGCCATGAACTGGGTCCGCCAGGCTCCAGGAAAGG |
| | | | | GTTTGGAATGGGTTGCTCGCATAAGAAGTAAATATAATAATTATGCAACATATTATGCCGATTCA |
| | | | | GTGAAAGGGAGGTTCACCATCTCCAGAGATGATTCAAAAAACACTGCCTATCTACAAATGAACAA |
| | | | | CTTGAAAACTGAGGACACTGCCGTGTACTACTGTGTGAGACATGGGAACTTCGGTAATAGCTACT |
| | | | | TATCCTACTTCGCTTACTGGGGCCAAGGGACTCTGGTCACCGTCTCCTCAGGTGGTGGTGGTTCT |
| | | | | GGCGGCGGCGGCTCCGGTGGTGGTGGTTCTGAGCTCGTTGTGACTCAGGAACCTTCACTCACCGT |
| | | | | ATCACCTGGTGGAACAGTCACACTCACTTGTGGCTCCTCGACTGGGGCTGTTACATCTGGCTACT |
| | | | | ACCCAAACTGGGTCCAACAAAAACCAGGTCAGGCACCCCGTGGTCTAATAGGTGGGACTAAGTTC |
| | | | | CTCGCCCCCGGTACTCCTGCCAGATTCTCAGGCTCCCTGCTTGGAGGCAAGGCTGCCCTCACCCT |
| | | | | CTCAGGGGTACAGCCAGAGGATGAGGCAGAATATTACTGTGCTCTATGGTACAGCAACCGCTGGG |
| | | | | TGTTCGGTGGAGGAACCAAACTGACTGTCCTA |
| 81. | CDR-L1 of A2J | artificial | aa | RSSTGAVTSGYYPN |
| 82. | CDR-L2 of A2J | artificial | aa | ATDMRPS |
| 83. | CDR-L3 of A2J | artificial | aa | ALWYSNRWV |
| 84. | CDR-H1 of A2J | artificial | aa | VYAMN |
| 85. | CDR-H2 of A2J | artificial | aa | RIRSKYNNYATYYADSVKK |
| 86. | CDR-H3 of A2J | artificial | aa | HGNFGNSYLSWWAY |
| 87. | VH of A2J | artificial | aa | EVQLVESGGGLVQPGGSLKLSCAASGFTFNVYAMNWVRQAPGKGLEWVARIRSKYNNYATYYADS |
| | | | | VKKRFTISRDDSKNTAYLQMNNLKTEDTAVYYCVRHGNFGNSYLSWWAYWGQGTLVTVSS |
| 88. | VH of A2J | artificial | nt | GAGGTGCAGCTGGTCGAGTCTGGAGGAGGATTGGTGCAGCCTGGAGGGTCATTGAAACTCTCATG |
| | | | | TGCAGCCTCTGGATTCACCTTCAATGTCTACGCCATGAACTGGGTCCGCCAGGCTCCAGGAAAGG |
| | | | | GTTTGGAATGGGTTGCTCGCATAAGAAGTAAATATAATAATTATGCAACATATTATGCCGATTCA |
| | | | | GTGAAAAAGAGGTTCACCATCTCCAGAGATGATTCAAAAAACACTGCCTATCTACAAATGAACAA |
| | | | | CTTGAAAACTGAGGACACTGCCGTGTACTACTGTGTGAGACATGGGAACTTCGGTAATAGCTACT |
| | | | | TATCCTGGTGGGCTTACTGGGGCCAAGGGACTCTGGTCACCGTCTCCTCA |
| 89. | VL of A2J | artificial | aa | QTVVTQEPSLTVSPGGTVTLTCRSSTGAVTSGYYPNWVQQKPGQAPRGLIGATDMRPSGTPARFS |
| | | | | GSLLGGKAALTLSGVQPEDEAEYYCALWYSNRWVFGGGTKLTVL |
| 90. | VL of A2J | artificial | nt | CAGACTGTTGTGACTCAGGAACCTTCACTCACCGTATCACCTGGTGGAACAGTCACACTCACTTG |
| | | | | TCGCTCCTCGACTGGGGCTGTTACATCTGGCTACTACCCAAACTGGGTCCAACAAAAACCAGGTC |
| | | | | AGGCACCCCGTGGTCTAATAGGTGCCACTGACATGAGGCCCTCTGGTACTCCTGCCAGATTCTCA |
| | | | | GGCTCCCTGCTTGGAGGCAAGGCTGCCCTCACCCTCTCAGGGGTACAGCCAGAGGATGAGGCAGA |
| | | | | ATATTACTGTGCTCTATGGTACAGCAACCGCTGGGTGTTCGGTGGAGGAACCAAACTGACTGTCC |
| | | | | TA |
| 91. | VH-P of A2J | artificial | aa | EVQLLESGGGLVQPGGSLKLSCAASGFTFNVYAMNWVRQAPGKGLEWVARIRSKYNNYATYYADS |
| | | | | VKKRFTISRDDSKNTAYLQMNNLKTEDTAVYYCVRHGNFGNSYLSWWAYWGQGTLVTVSS |
| 92. | VH-P of A2J | artificial | nt | GAGGTGCAGCTGCTCGAGTCTGGAGGAGGATTGGTGCAGCCTGGAGGGTCATTGAAACTCTCATG |
| | | | | TGCAGCCTCTGGATTCACCTTCAATGTCTACGCCATGAACTGGGTCCGCCAGGCTCCAGGAAAGG |
| | | | | GTTTGGAATGGGTTGCTCGCATAAGAAGTAAATATAATAATTATGCAACATATTATGCCGATTCA |
| | | | | GTGAAAAAGAGGTTCACCATCTCCAGAGATGATTCAAAAAACACTGCCTATCTACAAATGAACAA |
| | | | | CTTGAAAACTGAGGACACTGCCGTGTACTACTGTGTGAGACATGGGAACTTCGGTAATAGCTACT |
| | | | | TATCCTGGTGGGCTTACTGGGGCCAAGGGACTCTGGTCACCGTCTCCTCA |
| 93. | VL-P of A2J | artificial | aa | ELVVTQEPSLTVSPGGTVTLTCRSSTGAVTSGYYPNWVQQKPGQAPRGLIGATDMRPSGTPARFS |
| | | | | GSLLGGKAALTLSGVQPEDEAEYYCALWYSNRWVFGGGTKLTVL |
| 94. | VL-P of A2J | artificial | nt | GAGCTCGTTGTGACTCAGGAACCTTCACTCACCGTATCACCTGGTGGAACAGTCACACTCACTTG |
| | | | | TCGCTCCTCGACTGGGGCTGTTACATCTGGCTACTACCCAAACTGGGTCCAACAAAAACCAGGTC |
| | | | | AGGCACCCCGTGGTCTAATAGGTGCCACTGACATGAGGCCCTCTGGTACTCCTGCCAGATTCTCA |
| | | | | GGCTCCCTGCTTGGAGGCAAGGCTGCCCTCACCCTCTCAGGGGTACAGCCAGAGGATGAGGCAGA |
| | | | | ATATTACTGTGCTCTATGGTACAGCAACCGCTGGGTGTTCGGTGGAGGAACCAAACTGACTGTCC |
| | | | | TA |
| 95. | VH-VL of A2J | artificial | aa | EVQLVESGGGLVQPGGSLKLSCAASGFTFNVYAMNWVRQAPGKGLEWVARIRSKYNNYATYYADS |
| | | | | VKKRFTISRDDSKNTAYLQMNNLKTEDTAVYYCVRHGNFGNSYLSWWAYWGQGTLVTVSSGGGGS |
| | | | | GGGGSGGGGSQTVVTQEPSLTVSPGGTVTLTCRSSTGAVTSGYYPNWVQQKPGQAPRGLIGATDM |
| | | | | RPSGTPARFSGSLLGGKAALTLSGVQPEDEAEYYCALWYSNRWVFGGGTKLTVL |
| 96. | VH-VL of A2J | artificial | nt | GAGGTGCAGCTGGTCGAGTCTGGAGGAGGATTGGTGCAGCCTGGAGGGTCATTGAAACTCTCATG |
| | | | | TGCAGCCTCTGGATTCACCTTCAATGTCTACGCCATGAACTGGGTCCGCCAGGCTCCAGGAAAGG |
| | | | | GTTTGGAATGGGTTGCTCGCATAAGAAGTAAATATAATAATTATGCAACATATTATGCCGATTCA |
| | | | | GTGAAAAAGAGGTTCACCATCTCCAGAGATGATTCAAAAAACACTGCCTATCTACAAATGAACAA |
| | | | | CTTGAAAACTGAGGACACTGCCGTGTACTACTGTGTGAGACATGGGAACTTCGGTAATAGCTACT |
| | | | | TATCCTGGTGGGCTTACTGGGGCCAAGGGACTCTGGTCACCGTCTCCTCAGGTGGTGGTGGTTCT |
| | | | | GGCGGCGGCGGCTCCGGTGGTGGTGGTTCTCAGACTGTTGTGACTCAGGAACCTTCACTCACCGT |
| | | | | ATCACCTGGTGGAACAGTCACACTCACTTGTCGCTCCTCGACTGGGGCTGTTACATCTGGCTACT |
| | | | | ACCCAAACTGGGTCCAACAAAAACCAGGTCAGGCACCCCGTGGTCTAATAGGTGCCACTGACATG |
| | | | | AGGCCCTCTGGTACTCCTGCCAGATTCTCAGGCTCCCTGCTTGGAGGCAAGGCTGCCCTCACCCT |
| | | | | CTCAGGGGTACAGCCAGAGGATGAGGCAGAATATTACTGTGCTCTATGGTACAGCAACCGCTGGG |
| | | | | TGTTCGGTGGAGGAACCAAACTGACTGTCCTA |
| 97. | VH-VL-P of A2J | artificial | aa | EVQLLESGGGLVQPGGSLKLSCAASGFTFNVYAMNWVRQAPGKGLEWVARIRSKYNNYATYYADS |
| | | | | VKKRFTISRDDSKNTAYLQMNNLKTEDTAVYYCVRHGNFGNSYLSWWAYWGQGTLVTVSSGGGGS |
| | | | | GGGGSGGGGSELVVTQEPSLTVSPGGTVTLTCRSSTGAVTSGYYPNWVQQKPGQAPRGLIGATDM |
| | | | | RPSGTPARFSGSLLGGKAALTLSGVQPEDEAEYYCALWYSNRWVFGGGTKLTVL |
| 98. | VH-VL-P of A2J | artificial | nt | GAGGTGCAGCTGCTCGAGTCTGGAGGAGGATTGGTGCAGCCTGGAGGGTCATTGAAACTCTCATG |
| | | | | TGCAGCCTCTGGATTCACCTTCAATGTCTACGCCATGAACTGGGTCCGCCAGGCTCCAGGAAAGG |
| | | | | GTTTGGAATGGGTTGCTCGCATAAGAAGTAAATATAATAATTATGCAACATATTATGCCGATTCA |
| | | | | GTGAAAAAGAGGTTCACCATCTCCAGAGATGATTCAAAAAACACTGCCTATCTACAAATGAACAA |
| | | | | CTTGAAAACTGAGGACACTGCCGTGTACTACTGTGTGAGACATGGGAACTTCGGTAATAGCTACT |
| | | | | TATCCTGGTGGGCTTACTGGGGCCAAGGGACTCTGGTCACCGTCTCCTCAGGTGGTGGTGGTTCT |
| | | | | GGCGGCGGCGGCTCCGGTGGTGGTGGTTCTGAGCTCGTTGTGACTCAGGAACCTTCACTCACCGT |
| | | | | ATCACCTGGTGGAACAGTCACACTCACTTGTCGCTCCTCGACTGGGGCTGTTACATCTGGCTACT |
| | | | | ACCCAAACTGGGTCCAACAAAAACCAGGTCAGGCACCCCGTGGTCTAATAGGTGCCACTGACATG |
| | | | | AGGCCCTCTGGTACTCCTGCCAGATTCTCAGGCTCCCTGCTTGGAGGCAAGGCTGCCCTCACCCT |
| | | | | CTCAGGGGTACAGCCAGAGGATGAGGCAGAATATTACTGTGCTCTATGGTACAGCAACCGCTGGG |
| | | | | TGTTCGGTGGAGGAACCAAACTGACTGTCCTA |
| 99. | CDR-L1 of E1L | artificial | aa | GSSTGAVTSGYYPN |
| 100. | CDR-L2 of E1L | artificial | aa | GTKFLAP |
| 101. | CDR-L3 of E1L | artificial | aa | ALWYSNRWV |
| 102. | CDR-H1 of E1L | artificial | aa | KYAMN |
| 103. | CDR-H2 of E1L | artificial | aa | RIRSKYNNYATYYADSVKS |
| 104. | CDR-H3 of E1L | artificial | aa | HGNFGNSYTSYYAY |
| 105. | VH of E1L | artificial | aa | EVQLVESGGGLVQPGGSLKLSCAASGFTFNKYAMNWVRQAPGKGLEWVARIRSKYNNYATYYADS |
| | | | | VKSRFTISRDDSKNTAYLQMNNLKTEDTAVYYCVRHGNFGNSYTSYYAYWGQGTLVTVSS |
| 106. | VH of E1L | artificial | nt | GAGGTGCAGCTGGTCGAGTCTGGAGGAGGATTGGTGCAGCCTGGAGGGTCATTGAAACTCTCATG |
| | | | | TGCAGCCTCTGGATTCACCTTCAATAAGTACGCCATGAACTGGGTCCGCCAGGCTCCAGGAAAGG |
| | | | | GTTTGGAATGGGTTGCTCGCATAAGAAGTAAATATAATAATTATGCAACATATTATGCCGATTCA |
| | | | | GTGAAATCGAGGTTCACCATCTCCAGAGATGATTCAAAAAACACTGCCTATCTACAAATGAACAA |
| | | | | CTTGAAAACTGAGGACACTGCCGTGTACTACTGTGTGAGACATGGGAACTTCGGTAATAGCTACA |
| | | | | CATCCTACTACGCTTACTGGGGCCAAGGGACTCTGGTCACCGTCTCCTCA |
| 107. | VL of E1L | artificial | aa | QTVVTQEPSLTVSPGGTVTLTCGSSTGAVTSGYYPNWVQQKPGQAPRGLIGGTKFLAPGTPARFS |
| | | | | GSLLGGKAALTLSGVQPEDEAEYYCALWYSNRWVFGGGTKLTVL |
| 108. | VL of E1L | artificial | nt | CAGACTGTTGTGACTCAGGAACCTTCACTCACCGTATCACCTGGTGGAACAGTCACACTCACTTG |
| | | | | TGGCTCCTCGACTGGGGCTGTTACATCTGGCTACTACCCAAACTGGGTCCAACAAAAACCAGGTC |
| | | | | AGGCACCCCGTGGTCTAATAGGTGGGACTAAGTTCCTCGCCCCCGGTACTCCTGCCAGATTCTCA |
| | | | | GGCTCCCTGCTTGGAGGCAAGGCTGCCCTCACCCTCTCAGGGGTACAGCCAGAGGATGAGGCAGA |
| | | | | ATATTACTGTGCTCTATGGTACAGCAACCGCTGGGTGTTCGGTGGAGGAACCAAACTGACTGTCC |
| | | | | TA |
| 109. | VH-P of E1L | artificial | aa | EVQLLESGGGLVQPGGSLKLSCAASGFTFNKYAMNWVRQAPGKGLEWVARIRSKYNNYATYYADS |
| | | | | VKSRFTISRDDSKNTAYLQMNNLKTEDTAVYYCVRHGNFGNSYTSYYAYWGQGTLVTVSS |
| 110. | VH-P of E1L | artificial | nt | GAGGTGCAGCTGCTCGAGTCTGGAGGAGGATTGGTGCAGCCTGGAGGGTCATTGAAACTCTCATG |
| | | | | TGCAGCCTCTGGATTCACCTTCAATAAGTACGCCATGAACTGGGTCCGCCAGGCTCCAGGAAAGG |
| | | | | GTTTGGAATGGGTTGCTCGCATAAGAAGTAAATATAATAATTATGCAACATATTATGCCGATTCA |
| | | | | GTGAAATCGAGGTTCACCATCTCCAGAGATGATTCAAAAAACACTGCCTATCTACAAATGAACAA |
| | | | | CTTGAAAACTGAGGACACTGCCGTGTACTACTGTGTGAGACATGGGAACTTCGGTAATAGCTACA |
| | | | | CATCCTACTACGCTTACTGGGGCCAAGGGACTCTGGTCACCGTCTCCTCA |
| 111. | VL-P of E1L | artificial | aa | ELVVTQEPSLTVSPGGTVTLTCGSSTGAVTSGYYPNWVQQKPGQAPRGLIGGTKFLAPGTPARFS |
| | | | | GSLLGGKAALTLSGVQPEDEAEYYCALWYSNRWVFGGGTKLTVL |
| 112. | VL-P of E1L | artificial | nt | GAGCTCGTTGTGACTCAGGAACCTTCACTCACCGTATCACCTGGTGGAACAGTCACACTCACTTG |
| | | | | TGGCTCCTCGACTGGGGCTGTTACATCTGGCTACTACCCAAACTGGGTCCAACAAAAACCAGGTC |
| | | | | AGGCACCCCGTGGTCTAATAGGTGGGACTAAGTTCCTCGCCCCCGGTACTCCTGCCAGATTCTCA |
| | | | | GGCTCCCTGCTTGGAGGCAAGGCTGCCCTCACCCTCTCAGGGGTACAGCCAGAGGATGAGGCAGA |
| | | | | ATATTACTGTGCTCTATGGTACAGCAACCGCTGGGTGTTCGGTGGAGGAACCAAACTGACTGTCC |
| | | | | TA |
| 113. | VH-VL of E1L | artificial | aa | EVQLVESGGGLVQPGGSLKLSCAASGFTFNKYAMNWVRQAPGKGLEWVARIRSKYNNYATYYADS |
| | | | | VKSRFTISRDDSKNTAYLQMNNLKTEDTAVYYCVRHGNFGNSYTSYYAYWGQGTLVTVSSGGGGS |
| | | | | GGGGSGGGGSQTVVTQEPSLTVSPGGTVTLTCGSSTGAVTSGYYPNWVQQKPGQAPRGLIGGTKF |
| | | | | LAPGTPARFSGSLLGGKAALTLSGVQPEDEAEYYCALWYSNRWVFGGGTKLTVL |
| 114. | VH-VL of E1L | artificial | nt | GAGGTGCAGCTGGTCGAGTCTGGAGGAGGATTGGTGCAGCCTGGAGGGTCATTGAAACTCTCATG |
| | | | | TGCAGCCTCTGGATTCACCTTCAATAAGTACGCCATGAACTGGGTCCGCCAGGCTCCAGGAAAGG |
| | | | | GTTTGGAATGGGTTGCTCGCATAAGAAGTAAATATAATAATTATGCAACATATTATGCCGATTCA |
| | | | | GTGAAATCGAGGTTCACCATCTCCAGAGATGATTCAAAAAACACTGCCTATCTACAAATGAACAA |
| | | | | CTTGAAAACTGAGGACACTGCCGTGTACTACTGTGTGAGACATGGGAACTTCGGTAATAGCTACA |
| | | | | CATCCTACTACGCTTACTGGGGCCAAGGGACTCTGGTCACCGTCTCCTCAGGTGGTGGTGGTTCT |
| | | | | GGCGGCGGCGGCTCCGGTGGTGGTGGTTCTCAGACTGTTGTGACTCAGGAACCTTCACTCACCGT |
| | | | | ATCACCTGGTGGAACAGTCACACTCACTTGTGGCTCCTCGACTGGGGCTGTTACATCTGGCTACT |
| | | | | ACCCAAACTGGGTCCAACAAAAACCAGGTCAGGCACCCCGTGGTCTAATAGGTGGGACTAAGTTC |
| | | | | CTCGCCCCCGGTACTCCTGCCAGATTCTCAGGCTCCCTGCTTGGAGGCAAGGCTGCCCTCACCCT |
| | | | | CTCAGGGGTACAGCCAGAGGATGAGGCAGAATATTACTGTGCTCTATGGTACAGCAACCGCTGGG |
| | | | | TGTTCGGTGGAGGAACCAAACTGACTGTCCTA |
| 115. | VH-VL-P of E1L | artificial | aa | EVQLLESGGGLVQPGGSLKLSCAASGFTFNKYAMNWVRQAPGKGLEWVARIRSKYNNYATYYADS |
| | | | | VKSRFTISRDDSKNTAYLQMNNLKTEDTAVYYCVRHGNFGNSYTSYYAYWGQGTLVTVSSGGGGS |
| | | | | GGGGSGGGGSELVVTQEPSLTVSPGGTVTLTCGSSTGAVTSGYYPNWVQQKPGQAPRGLIGGTKF |
| | | | | LAPGTPARFSGSLLGGKAALTLSGVQPEDEAEYYCALWYSNRWVFGGGTKLTVL |
| 116. | VH-VL-P of E1L | artificial | nt | GAGGTGCAGCTGCTCGAGTCTGGAGGAGGATTGGTGCAGCCTGGAGGGTCATTGAAACTCTCATG |
| | | | | TGCAGCCTCTGGATTCACCTTCAATAAGTACGCCATGAACTGGGTCCGCCAGGCTCCAGGAAAGG |
| | | | | GTTTGGAATGGGTTGCTCGCATAAGAAGTAAATATAATAATTATGCAACATATTATGCCGATTCA |
| | | | | GTGAAATCGAGGTTCACCATCTCCAGAGATGATTCAAAAAACACTGCCTATCTACAAATGAACAA |
| | | | | CTTGAAAACTGAGGACACTGCCGTGTACTACTGTGTGAGACATGGGAACTTCGGTAATAGCTACA |
| | | | | CATCCTACTACGCTTACTGGGGCCAAGGGACTCTGGTCACCGTCTCCTCAGGTGGTGGTGGTTCT |
| | | | | GGCGGCGGCGGCTCCGGTGGTGGTGGTTCTGAGCTCGTTGTGACTCAGGAACCTTCACTCACCGT |
| | | | | ATCACCTGGTGGAACAGTCACACTCACTTGTGGCTCCTCGACTGGGGCTGTTACATCTGGCTACT |
| | | | | ACCCAAACTGGGTCCAACAAAAACCAGGTCAGGCACCCCGTGGTCTAATAGGTGGGACTAAGTTC |
| | | | | CTCGCCCCCGGTACTCCTGCCAGATTCTCAGGCTCCCTGCTTGGAGGCAAGGCTGCCCTCACCCT |
| | | | | CTCAGGGGTACAGCCAGAGGATGAGGCAGAATATTACTGTGCTCTATGGTACAGCAACCGCTGGG |
| | | | | TGTTCGGTGGAGGAACCAAACTGACTGTCCTA |
| 117. | CDR-L1 of E2M | artificial | aa | RSSTGAVTSGYYPN |
| 118. | CDR-L2 of E2M | artificial | aa | ATDMRPS |
| 119. | CDR-L3 of E2M | artificial | aa | ALWYSNRWV |
| 120. | CDR-H1 of E2M | artificial | aa | GYAMN |
| 121. | CDR-H2 of E2M | artificial | aa | RIRSKYNNYATYYADSVKE |
| 122. | CDR-H3 of E2M | artificial | aa | HRNFGNSYLSWFAY |
| 123. | VH of E2M | artificial | aa | EVQLVESGGGLVQPGGSLKLSCAASGFTFNGYAMNWVRQAPGKGLEWVARIRSKYNNYATYYADS |
| | | | | VKERFTISRDDSKNTAYLQMNNLKTEDTAVYYCVRHRNFGNSYLSWFAYWGQGTLVTVSS |
| 124. | VH of E2M | artificial | nt | GAGGTGCAGCTGGTCGAGTCTGGAGGAGGATTGGTGCAGCCTGGAGGGTCATTGAAACTCTCATG |
| | | | | TGCAGCCTCTGGATTCACCTTCAATGGCTACGCCATGAACTGGGTCCGCCAGGCTCCAGGAAAGG |
| | | | | GTTTGGAATGGGTTGCTCGCATAAGAAGTAAATATAATAATTATGCAACATATTATGCCGATTCA |
| | | | | GTGAAAGAGAGGTTCACCATCTCCAGAGATGATTCAAAAAACACTGCCTATCTACAAATGAACAA |
| | | | | CTTGAAAACTGAGGACACTGCCGTGTACTACTGTGTGAGACATAGGAACTTCGGTAATAGCTACT |
| | | | | TATCCTGGTTCGCTTACTGGGGCCAAGGGACTCTGGTCACCGTCTCCTCA |
| 125. | VL of E2M | artificial | aa | QTVVTQEPSLTVSPGGTVTLTCRSSTGAVTSGYYPNWVQQKPGQAPRGLIGATDMRPSGTPARFS |
| | | | | GSLLGGKAALTLSGVQPEDEAEYYCALWYSNRWVFGGGTKLTVL |
| 126. | VL of E2M | artificial | nt | CAGACTGTTGTGACTCAGGAACCTTCACTCACCGTATCACCTGGTGGAACAGTCACACTCACTTG |
| | | | | TCGCTCCTCGACTGGGGCTGTTACATCTGGCTACTACCCAAACTGGGTCCAACAAAAACCAGGTC |
| | | | | AGGCACCCCGTGGTCTAATAGGTGCCACTGACATGAGGCCCTCTGGTACTCCTGCCAGATTCTCA |
| | | | | GGCTCCCTGCTTGGAGGCAAGGCTGCCCTCACCCTCTCAGGGGTACAGCCAGAGGATGAGGCAGA |
| | | | | ATATTACTGTGCTCTATGGTACAGCAACCGCTGGGTGTTCGGTGGAGGAACCAAACTGACTGTCC |
| | | | | TA |
| 127. | VH-P of E2M | artificial | aa | EVQLLESGGGLVQPGGSLKLSCAASGFTFNGYAMNWVRQAPGKGLEWVARIRSKYNNYATYYADS |
| | | | | VKERFTISRDDSKNTAYLQMNNLKTEDTAVYYCVRHRNFGNSYLSWFAYWGQGTLVTVSS |
| 128. | VH-P of E2M | artificial | nt | GAGGTGCAGCTGCTCGAGTCTGGAGGAGGATTGGTGCAGCCTGGAGGGTCATTGAAACTCTCATG |
| | | | | TGCAGCCTCTGGATTCACCTTCAATGGCTACGCCATGAACTGGGTCCGCCAGGCTCCAGGAAAGG |
| | | | | GTTTGGAATGGGTTGCTCGCATAAGAAGTAAATATAATAATTATGCAACATATTATGCCGATTCA |
| | | | | GTGAAAGAGAGGTTCACCATCTCCAGAGATGATTCAAAAAACACTGCCTATCTACAAATGAACAA |
| | | | | CTTGAAAACTGAGGACACTGCCGTGTACTACTGTGTGAGACATAGGAACTTCGGTAATAGCTACT |
| | | | | TATCCTGGTTCGCTTACTGGGGCCAAGGGACTCTGGTCACCGTCTCCTCA |
| 129. | VL-P of E2M | artificial | aa | ELVVTQEPSLTVSPGGTVTLTCRSSTGAVTSGYYPNWVQQKPGQAPRGLIGATDMRPSGTPARFS |
| | | | | GSLLGGKAALTLSGVQPEDEAEYYCALWYSNRWVFGGGTKLTVL |
| 130. | VL-P of E2M | artificial | nt | GAGCTCGTTGTGACTCAGGAACCTTCACTCACCGTATCACCTGGTGGAACAGTCACACTCACTTG |
| | | | | TCGCTCCTCGACTGGGGCTGTTACATCTGGCTACTACCCAAACTGGGTCCAACAAAAACCAGGTC |
| | | | | AGGCACCCCGTGGTCTAATAGGTGCCACTGACATGAGGCCCTCTGGTACTCCTGCCAGATTCTCA |
| | | | | GGCTCCCTGCTTGGAGGCAAGGCTGCCCTCACCCTCTCAGGGGTACAGCCAGAGGATGAGGCAGA |
| | | | | ATATTACTGTGCTCTATGGTACAGCAACCGCTGGGTGTTCGGTGGAGGAACCAAACTGACTGTCC |
| | | | | TA |
| 131. | VH-VL of E2M | artificial | aa | EVQLVESGGGLVQPGGSLKLSCAASGFTFNGYAMNWVRQAPGKGLEWVARIRSKYNNYATYYADS |
| | | | | VKERFTISRDDSKNTAYLQMNNLKTEDTAVYYCVRHRNFGNSYLSWFAYWGQGTLVTVSSGGGGS |
| | | | | GGGGSGGGGSQTVVTQEPSLTVSPGGTVTLTCRSSTGAVTSGYYPNWVQQKPGQAPRGLIGATDM |
| | | | | RPSGTPARFSGSLLGGKAALTLSGVQPEDEAEYYCALWYSNRWVFGGGTKLTVL |
| 132. | VH-VL of E2M | artificial | nt | GAGGTGCAGCTGGTCGAGTCTGGAGGAGGATTGGTGCAGCCTGGAGGGTCATTGAAACTCTCATG |
| | | | | TGCAGCCTCTGGATTCACCTTCAATGGCTACGCCATGAACTGGGTCCGCCAGGCTCCAGGAAAGG |
| | | | | GTTTGGAATGGGTTGCTCGCATAAGAAGTAAATATAATAATTATGCAACATATTATGCCGATTCA |
| | | | | GTGAAAGAGAGGTTCACCATCTCCAGAGATGATTCAAAAAACACTGCCTATCTACAAATGAACAA |
| | | | | CTTGAAAACTGAGGACACTGCCGTGTACTACTGTGTGAGACATAGGAACTTCGGTAATAGCTACT |
| | | | | TATCCTGGTTCGCTTACTGGGGCCAAGGGACTCTGGTCACCGTCTCCTCAGGTGGTGGTGGTTCT |
| | | | | GGCGGCGGCGGCTCCGGTGGTGGTGGTTCTCAGACTGTTGTGACTCAGGAACCTTCACTCACCGT |
| | | | | ATCACCTGGTGGAACAGTCACACTCACTTGTCGCTCCTCGACTGGGGCTGTTACATCTGGCTACT |
| | | | | ACCCAAACTGGGTCCAACAAAAACCAGGTCAGGCACCCCGTGGTCTAATAGGTGCCACTGACATG |
| | | | | AGGCCCTCTGGTACTCCTGCCAGATTCTCAGGCTCCCTGCTTGGAGGCAAGGCTGCCCTCACCCT |
| | | | | CTCAGGGGTACAGCCAGAGGATGAGGCAGAATATTACTGTGCTCTATGGTACAGCAACCGCTGGG |
| | | | | TGTTCGGTGGAGGAACCAAACTGACTGTCCTA |
| 133. | VH-VL-P of E2M | artificial | aa | EVQLLESGGGLVQPGGSLKLSCAASGFTFNGYAMNWVRQAPGKGLEWVARIRSKYNNYATYYADS |
| | | | | VKERFTISRDDSKNTAYLQMNNLKTEDTAVYYCVRHRNFGNSYLSWFAYWGQGTLVTVSSGGGGS |
| | | | | GGGGSGGGGSELVVTQEPSLTVSPGGTVTLTCRSSTGAVTSGYYPNWVQQKPGQAPRGLIGATDM |
| | | | | RPSGTPARFSGSLLGGKAALTLSGVQPEDEAEYYCALWYSNRWVFGGGTKLTVL |
| 134. | VH-VL-P of E2M | artificial | nt | GAGGTGCAGCTGCTCGAGTCTGGAGGAGGATTGGTGCAGCCTGGAGGGTCATTGAAACTCTCATG |
| | | | | TGCAGCCTCTGGATTCACCTTCAATGGCTACGCCATGAACTGGGTCCGCCAGGCTCCAGGAAAGG |
| | | | | GTTTGGAATGGGTTGCTCGCATAAGAAGTAAATATAATAATTATGCAACATATTATGCCGATTCA |
| | | | | GTGAAAGAGAGGTTCACCATCTCCAGAGATGATTCAAAAAACACTGCCTATCTACAAATGAACAA |
| | | | | CTTGAAAACTGAGGACACTGCCGTGTACTACTGTGTGAGACATAGGAACTTCGGTAATAGCTACT |
| | | | | TATCCTGGTTCGCTTACTGGGGCCAAGGGACTCTGGTCACCGTCTCCTCAGGTGGTGGTGGTTCT |
| | | | | GGCGGCGGCGGCTCCGGTGGTGGTGGTTCTGAGCTCGTTGTGACTCAGGAACCTTCACTCACCGT |
| | | | | ATCACCTGGTGGAACAGTCACACTCACTTGTCGCTCCTCGACTGGGGCTGTTACATCTGGCTACT |
| | | | | ACCCAAACTGGGTCCAACAAAAACCAGGTCAGGCACCCCGTGGTCTAATAGGTGCCACTGACATG |
| | | | | AGGCCCTCTGGTACTCCTGCCAGATTCTCAGGCTCCCTGCTTGGAGGCAAGGCTGCCCTCACCCT |
| | | | | CTCAGGGGTACAGCCAGAGGATGAGGCAGAATATTACTGTGCTCTATGGTACAGCAACCGCTGGG |
| | | | | TGTTCGGTGGAGGAACCAAACTGACTGTCCTA |
| 135. | CDR-L1 of F7O | artificial | aa | GSSTGAVTSGYYPN |
| 136. | CDR-L2 of F7O | artificial | aa | GTKFLAP |
| 137. | CDR-L3 of F7O | artificial | aa | ALWYSNRWV |
| 138. | CDR-H1 of F7O | artificial | aa | VYAMN |
| 139. | CDR-H2 of F7O | artificial | aa | RIRSKYNNYATYYADSVKK |
| 140. | CDR-H3 of F7O | artificial | aa | HGNFGNSYISWWAY |
| 141. | VH of F7O | artificial | aa | EVQLVESGGGLVQPGGSLKLSCAASGFTFNVYAMNWVRQAPGKGLEWVARIRSKYNNYATYYADS |
| | | | | VKKRFTISRDDSKNTAYLQMNNLKTEDTAVYYCVRHGNFGNSYISWWAYWGQGTLVTVSS |
| 142. | VH of F7O | artificial | nt | GAGGTGCAGCTGGTCGAGTCTGGAGGAGGATTGGTGCAGCCTGGAGGGTCATTGAAACTCTCATG |
| | | | | TGCAGCCTCTGGATTCACCTTCAATGTGTACGCCATGAACTGGGTCCGCCAGGCTCCAGGAAAGG |
| | | | | GTTTGGAATGGGTTGCTCGCATAAGAAGTAAATATAATAATTATGCAACATATTATGCCGATTCA |
| | | | | GTGAAAAAGAGGTTCACCATCTCCAGAGATGATTCAAAAAACACTGCCTATCTACAAATGAACAA |
| | | | | CTTGAAAACTGAGGACACTGCCGTGTACTACTGTGTGAGACATGGGAACTTCGGTAATAGCTACA |
| | | | | TATCCTGGTGGGCTTACTGGGGCCAAGGGACTCTGGTCACCGTCTCCTCA |
| 143. | VL of F7O | artificial | aa | QTVVTQEPSLTVSPGGTVTLTCGSSTGAVTSGYYPNWVQQKPGQAPRGLIGGTKFLAPGTPARFS |
| | | | | GSLLGGKAALTLSGVQPEDEAEYYCALWYSNRWVFGGGTKLTVL |
| 144. | VL of F7O | artificial | nt | CAGACTGTTGTGACTCAGGAACCTTCACTCACCGTATCACCTGGTGGAACAGTCACACTCACTTG |
| | | | | TGGCTCCTCGACTGGGGCTGTTACATCTGGCTACTACCCAAACTGGGTCCAACAAAAACCAGGTC |
| | | | | AGGCACCCCGTGGTCTAATAGGTGGGACTAAGTTCCTCGCCCCCGGTACTCCTGCCAGATTCTCA |
| | | | | GGCTCCCTGCTTGGAGGCAAGGCTGCCCTCACCCTCTCAGGGGTACAGCCAGAGGATGAGGCAGA |
| | | | | ATATTACTGTGCTCTATGGTACAGCAACCGCTGGGTGTTCGGTGGAGGAACCAAACTGACTGTCC |
| | | | | TA |
| 145. | VH-P of F7O | artificial | aa | EVQLLESGGGLVQPGGSLKLSCAASGFTFNVYAMNWVRQAPGKGLEWVARIRSKYNNYATYYADS |
| | | | | VKKRFTISRDDSKNTAYLQMNNLKTEDTAVYYCVRHGNFGNSYISWWAYWGQGTLVTVSS |
| 146. | VH-P of F7O | artificial | nt | GAGGTGCAGCTGCTCGAGTCTGGAGGAGGATTGGTGCAGCCTGGAGGGTCATTGAAACTCTCATG |
| | | | | TGCAGCCTCTGGATTCACCTTCAATGTGTACGCCATGAACTGGGTCCGCCAGGCTCCAGGAAAGG |
| | | | | GTTTGGAATGGGTTGCTCGCATAAGAAGTAAATATAATAATTATGCAACATATTATGCCGATTCA |
| | | | | GTGAAAAAGAGGTTCACCATCTCCAGAGATGATTCAAAAAACACTGCCTATCTACAAATGAACAA |
| | | | | CTTGAAAACTGAGGACACTGCCGTGTACTACTGTGTGAGACATGGGAACTTCGGTAATAGCTACA |
| | | | | TATCCTGGTGGGCTTACTGGGGCCAAGGGACTCTGGTCACCGTCTCCTCA |
| 147. | VL-P of F7O | artificial | aa | ELVVTQEPSLTVSPGGTVTLTCGSSTGAVTSGYYPNWVQQKPGQAPRGLIGGTKFLAPGTPARFS |
| | | | | GSLLGGKAALTLSGVQPEDEAEYYCALWYSNRWVFGGGTKLTVL |
| 148. | VL-P of F7O | artificial | nt | GAGCTCGTTGTGACTCAGGAACCTTCACTCACCGTATCACCTGGTGGAACAGTCACACTCACTTG |
| | | | | TGGCTCCTCGACTGGGGCTGTTACATCTGGCTACTACCCAAACTGGGTCCAACAAAAACCAGGTC |
| | | | | AGGCACCCCGTGGTCTAATAGGTGGGACTAAGTTCCTCGCCCCCGGTACTCCTGCCAGATTCTCA |
| | | | | GGCTCCCTGCTTGGAGGCAAGGCTGCCCTCACCCTCTCAGGGGTACAGCCAGAGGATGAGGCAGA |
| | | | | ATATTACTGTGCTCTATGGTACAGCAACCGCTGGGTGTTCGGTGGAGGAACCAAACTGACTGTCC |
| | | | | TA |
| 149. | VH-VL of F7O | artificial | aa | EVQLVESGGGLVQPGGSLKLSCAASGFTFNVYAMNWVRQAPGKGLEWVARIRSKYNNYATYYADS |
| | | | | VKKRFTISRDDSKNTAYLQMNNLKTEDTAVYYCVRHGNFGNSYISWWAYWGQGTLVTVSSGGGGS |
| | | | | GGGGSGGGGSQTVVTQEPSLTVSPGGTVTLTCGSSTGAVTSGYYPNWVQQKPGQAPRGLIGGTKF |
| | | | | LAPGTPARFSGSLLGGKAALTLSGVQPEDEAEYYCALWYSNRWVFGGGTKLTVL |
| 150. | VH-VL of F7O | artificial | nt | GAGGTGCAGCTGGTCGAGTCTGGAGGAGGATTGGTGCAGCCTGGAGGGTCATTGAAACTCTCATG |
| | | | | TGCAGCCTCTGGATTCACCTTCAATGTGTACGCCATGAACTGGGTCCGCCAGGCTCCAGGAAAGG |
| | | | | GTTTGGAATGGGTTGCTCGCATAAGAAGTAAATATAATAATTATGCAACATATTATGCCGATTCA |
| | | | | GTGAAAAAGAGGTTCACCATCTCCAGAGATGATTCAAAAAACACTGCCTATCTACAAATGAACAA |
| | | | | CTTGAAAACTGAGGACACTGCCGTGTACTACTGTGTGAGACATGGGAACTTCGGTAATAGCTACA |
| | | | | TATCCTGGTGGGCTTACTGGGGCCAAGGGACTCTGGTCACCGTCTCCTCAGGTGGTGGTGGTTCT |
| | | | | GGCGGCGGCGGCTCCGGTGGTGGTGGTTCTCAGACTGTTGTGACTCAGGAACCTTCACTCACCGT |
| | | | | ATCACCTGGTGGAACAGTCACACTCACTTGTGGCTCCTCGACTGGGGCTGTTACATCTGGCTACT |
| | | | | ACCCAAACTGGGTCCAACAAAAACCAGGTCAGGCACCCCGTGGTCTAATAGGTGGGACTAAGTTC |
| | | | | CTCGCCCCCGGTACTCCTGCCAGATTCTCAGGCTCCCTGCTTGGAGGCAAGGCTGCCCTCACCCT |
| | | | | CTCAGGGGTACAGCCAGAGGATGAGGCAGAATATTACTGTGCTCTATGGTACAGCAACCGCTGGG |
| | | | | TGTTCGGTGGAGGAACCAAACTGACTGTCCTA |
| 151. | VH-VL-P of F7O | artificial | aa | EVQLLESGGGLVQPGGSLKLSCAASGFTFNVYAMNWVRQAPGKGLEWVARIRSKYNNYATYYADS |
| | | | | VKKRFTISRDDSKNTAYLQMNNLKTEDTAVYYCVRHGNFGNSYISWWAYWGQGTLVTVSSGGGGS |
| | | | | GGGGSGGGGSELVVTQEPSLTVSPGGTVTLTCGSSTGAVTSGYYPNWVQQKPGQAPRGLIGGTKF |
| | | | | LAPGTPARFSGSLLGGKAALTLSGVQPEDEAEYYCALWYSNRWVFGGGTKLTVL |
| 152. | VH-VL-P of F7O | artificial | nt | GAGGTGCAGCTGCTCGAGTCTGGAGGAGGATTGGTGCAGCCTGGAGGGTCATTGAAACTCTCATG |
| | | | | TGCAGCCTCTGGATTCACCTTCAATGTGTACGCCATGAACTGGGTCCGCCAGGCTCCAGGAAAGG |
| | | | | GTTTGGAATGGGTTGCTCGCATAAGAAGTAAATATAATAATTATGCAACATATTATGCCGATTCA |
| | | | | GTGAAAAAGAGGTTCACCATCTCCAGAGATGATTCAAAAAACACTGCCTATCTACAAATGAACAA |
| | | | | CTTGAAAACTGAGGACACTGCCGTGTACTACTGTGTGAGACATGGGAACTTCGGTAATAGCTACA |
| | | | | TATCCTGGTGGGCTTACTGGGGCCAAGGGACTCTGGTCACCGTCTCCTCAGGTGGTGGTGGTTCT |
| | | | | GGCGGCGGCGGCTCCGGTGGTGGTGGTTCTGAGCTCGTTGTGACTCAGGAACCTTCACTCACCGT |
| | | | | ATCACCTGGTGGAACAGTCACACTCACTTGTGGCTCCTCGACTGGGGCTGTTACATCTGGCTACT |
| | | | | ACCCAAACTGGGTCCAACAAAAACCAGGTCAGGCACCCCGTGGTCTAATAGGTGGGACTAAGTTC |
| | | | | CTCGCCCCCGGTACTCCTGCCAGATTCTCAGGCTCCCTGCTTGGAGGCAAGGCTGCCCTCACCCT |
| | | | | CTCAGGGGTACAGCCAGAGGATGAGGCAGAATATTACTGTGCTCTATGGTACAGCAACCGCTGGG |
| | | | | TGTTCGGTGGAGGAACCAAACTGACTGTCCTA |
| 153. | CDR-L1 of F12Q | artificial | aa | GSSTGAVTSGNYPN |
| 154. | CDR-L2 of F12Q | artificial | aa | GTKFLAP |
| 155. | CDR-L3 of F12Q | artificial | aa | VLWYSNRWV |
| 156. | CDR-H1 of F12Q | artificial | aa | SYAMN |
| 157. | CDR-H2 of F12Q | artificial | aa | RIRSKYNNYATYYADSVKG |
| 158. | CDR-H3 of F12Q | artificial | aa | HGNFGNSYVSWWAY |
| 159. | VH of F12Q | artificial | aa | EVQLVESGGGLVQPGGSLKLSCAASGFTFNSYAMNWVRQAPGKGLEWVARIRSKYNNYATYYADS |
| | | | | VKGRFTISRDDSKNTAYLQMNNLKTEDTAVYYCVRHGNFGNSYVSWWAYWGQGTLVTVSS |
| 160. | VH of F12Q | artificial | nt | GAGGTGCAGCTGGTCGAGTCTGGAGGAGGATTGGTGCAGCCTGGAGGGTCATTGAAACTCTCATG |
| | | | | TGCAGCCTCTGGATTCACCTTCAATAGCTACGCCATGAACTGGGTCCGCCAGGCTCCAGGAAAGG |
| | | | | GTTTGGAATGGGTTGCTCGCATAAGAAGTAAATATAATAATTATGCAACATATTATGCCGATTCA |
| | | | | GTGAAAGGCAGGTTCACCATCTCCAGAGATGATTCAAAAAACACTGCCTATCTACAAATGAACAA |
| | | | | CTTGAAAACTGAGGACACTGCCGTGTACTACTGTGTGAGACATGGGAACTTCGGTAATAGCTACG |
| | | | | TTTCCTGGTGGGCTTACTGGGGCCAAGGGACTCTGGTCACCGTCTCCTCA |
| 161. | VL of F12Q | artificial | aa | QTVVTQEPSLTVSPGGTVTLTCGSSTGAVTSGNYPNWVQQKPGQAPRGLIGGTKFLAPGTPARFS |
| | | | | GSLLGGKAALTLSGVQPEDEAEYYCVLWYSNRWVFGGGTKLTVL |
| 162. | VL of F12Q | artificial | nt | CAGACTGTTGTGACTCAGGAACCTTCACTCACCGTATCACCTGGTGGAACAGTCACACTCACTTG |
| | | | | TGGCTCCTCGACTGGGGCTGTTACATCTGGCAACTACCCAAACTGGGTCCAACAAAAACCAGGTC |
| | | | | AGGCACCCCGTGGTCTAATAGGTGGGACTAAGTTCCTCGCCCCCGGTACTCCTGCCAGATTCTCA |
| | | | | GGCTCCCTGCTTGGAGGCAAGGCTGCCCTCACCCTCTCAGGGGTACAGCCAGAGGATGAGGCAGA |
| | | | | ATATTACTGTGTTCTATGGTACAGCAACCGCTGGGTGTTCGGTGGAGGAACCAAACTGACTGTCC |
| | | | | TA |
| 163. | VH-P of F12Q | artificial | aa | EVQLLESGGGLVQPGGSLKLSCAASGFTFNSYAMNWVRQAPGKGLEWVARIRSKYNNYATYYADS |
| | | | | VKGRFTISRDDSKNTAYLQMNNLKTEDTAVYYCVRHGNFGNSYVSWWAYWGQGTLVTVSS |
| 164. | VH-P of F12Q | artificial | nt | GAGGTGCAGCTGCTCGAGTCTGGAGGAGGATTGGTGCAGCCTGGAGGGTCATTGAAACTCTCATG |
| | | | | TGCAGCCTCTGGATTCACCTTCAATAGCTACGCCATGAACTGGGTCCGCCAGGCTCCAGGAAAGG |
| | | | | GTTTGGAATGGGTTGCTCGCATAAGAAGTAAATATAATAATTATGCAACATATTATGCCGATTCA |
| | | | | GTGAAAGGCAGGTTCACCATCTCCAGAGATGATTCAAAAAACACTGCCTATCTACAAATGAACAA |
| | | | | CTTGAAAACTGAGGACACTGCCGTGTACTACTGTGTGAGACATGGGAACTTCGGTAATAGCTACG |
| | | | | TTTCCTGGTGGGCTTACTGGGGCCAAGGGACTCTGGTCACCGTCTCCTCA |
| 165. | VL-P of F12Q | artificial | aa | ELVVTQEPSLTVSPGGTVTLTCGSSTGAVTSGNYPNWVQQKPGQAPRGLIGGTKFLAPGTPARFS |
| | | | | GSLLGGKAALTLSGVQPEDEAEYYCVLWYSNRWVFGGGTKLTVL |
| 166. | VL-P of F12Q | artificial | nt | GAGCTCGTTGTGACTCAGGAACCTTCACTCACCGTATCACCTGGTGGAACAGTCACACTCACTTG |
| | | | | TGGCTCCTCGACTGGGGCTGTTACATCTGGCAACTACCCAAACTGGGTCCAACAAAAACCAGGTC |
| | | | | AGGCACCCCGTGGTCTAATAGGTGGGACTAAGTTCCTCGCCCCCGGTACTCCTGCCAGATTCTCA |
| | | | | GGCTCCCTGCTTGGAGGCAAGGCTGCCCTCACCCTCTCAGGGGTACAGCCAGAGGATGAGGCAGA |
| | | | | ATATTACTGTGTTCTATGGTACAGCAACCGCTGGGTGTTCGGTGGAGGAACCAAACTGACTGTCC |
| | | | | TA |
| 167. | VH-VL of F12Q | artificial | aa | EVQLVESGGGLVQPGGSLKLSCAASGFTFNSYAMNWVRQAPGKGLEWVARIRSKYNNYATYYADS |
| | | | | VKGRFTISRDDSKNTAYLQMNNLKTEDTAVYYCVRHGNFGNSYVSWWAYWGQGTLVTVSSGGGGS |
| | | | | GGGGSGGGGSQTVVTQEPSLTVSPGGTVTLTCGSSTGAVTSGNYPNWVQQKPGQAPRGLIGGTKF |
| | | | | LAPGTPARFSGSLLGGKAALTLSGVQPEDEAEYYCVLWYSNRWVFGGGTKLTVL |
| 168. | VH-VL of F12Q | artificial | nt | GAGGTGCAGCTGGTCGAGTCTGGAGGAGGATTGGTGCAGCCTGGAGGGTCATTGAAACTCTCATG |
| | | | | TGCAGCCTCTGGATTCACCTTCAATAGCTACGCCATGAACTGGGTCCGCCAGGCTCCAGGAAAGG |
| | | | | GTTTGGAATGGGTTGCTCGCATAAGAAGTAAATATAATAATTATGCAACATATTATGCCGATTCA |
| | | | | GTGAAAGGCAGGTTCACCATCTCCAGAGATGATTCAAAAAACACTGCCTATCTACAAATGAACAA |
| | | | | CTTGAAAACTGAGGACACTGCCGTGTACTACTGTGTGAGACATGGGAACTTCGGTAATAGCTACG |
| | | | | TTTCCTGGTGGGCTTACTGGGGCCAAGGGACTCTGGTCACCGTCTCCTCAGGTGGTGGTGGTTCT |
| | | | | GGCGGCGGCGGCTCCGGTGGTGGTGGTTCTCAGACTGTTGTGACTCAGGAACCTTCACTCACCGT |
| | | | | ATCACCTGGTGGAACAGTCACACTCACTTGTGGCTCCTCGACTGGGGCTGTTACATCTGGCAACT |
| | | | | ACCCAAACTGGGTCCAACAAAAACCAGGTCAGGCACCCCGTGGTCTAATAGGTGGGACTAAGTTC |
| | | | | CTCGCCCCCGGTACTCCTGCCAGATTCTCAGGCTCCCTGCTTGGAGGCAAGGCTGCCCTCACCCT |
| | | | | CTCAGGGGTACAGCCAGAGGATGAGGCAGAATATTACTGTGTTCTATGGTACAGCAACCGCTGGG |
| | | | | TGTTCGGTGGAGGAACCAAACTGACTGTCCTA |
| 169. | VH-VL-P of | artificial | aa | EVQLLESGGGLVQPGGSLKLSCAASGFTFNSYAMNWVRQAPGKGLEWVARIRSKYNNYATYYADS |
| | F12Q | | | VKGRFTISRDDSKNTAYLQMNNLKTEDTAVYYCVRHGNFGNSYVSWWAYWGQGTLVTVSSGGGGS |
| | | | | GGGGSGGGGSELVVTQEPSLTVSPGGTVTLTCGSSTGAVTSGNYPNWVQQKPGQAPRGLIGGTKF |
| | | | | LAPGTPARFSGSLLGGKAALTLSGVQPEDEAEYYCVLWYSNRWVFGGGTKLTVL |
| 170. | VH-VL-P of | artificial | nt | GAGGTGCAGCTGCTCGAGTCTGGAGGAGGATTGGTGCAGCCTGGAGGGTCATTGAAACTCTCATG |
| | F12Q | | | TGCAGCCTCTGGATTCACCTTCAATAGCTACGCCATGAACTGGGTCCGCCAGGCTCCAGGAAAGG |
| | | | | GTTTGGAATGGGTTGCTCGCATAAGAAGTAAATATAATAATTATGCAACATATTATGCCGATTCA |
| | | | | GTGAAAGGCAGGTTCACCATCTCCAGAGATGATTCAAAAAACACTGCCTATCTACAAATGAACAA |
| | | | | CTTGAAAACTGAGGACACTGCCGTGTACTACTGTGTGAGACATGGGAACTTCGGTAATAGCTACG |
| | | | | TTTCCTGGTGGGCTTACTGGGGCCAAGGGACTCTGGTCACCGTCTCCTCAGGTGGTGGTGGTTCT |
| | | | | GGCGGCGGCGGCTCCGGTGGTGGTGGTTCTGAGCTCGTTGTGACTCAGGAACCTTCACTCACCGT |
| | | | | ATCACCTGGTGGAACAGTCACACTCACTTGTGGCTCCTCGACTGGGGCTGTTACATCTGGCAACT |
| | | | | ACCCAAACTGGGTCCAACAAAAACCAGGTCAGGCACCCCGTGGTCTAATAGGTGGGACTAAGTTC |
| | | | | CTCGCCCCCGGTACTCCTGCCAGATTCTCAGGCTCCCTGCTTGGAGGCAAGGCTGCCCTCACCCT |
| | | | | CTCAGGGGTACAGCCAGAGGATGAGGCAGAATATTACTGTGTTCTATGGTACAGCAACCGCTGGG |
| | | | | TGTTCGGTGGAGGAACCAAACTGACTGTCCTA |
| 171. | CDR-L1 of I2C | artificial | aa | GSSTGAVTSGNYPN |
| 172. | CDR-L2 of I2C | artificial | aa | GTKFLAP |
| 173. | CDR-L3 of I2C | artificial | aa | VLWYSNRWV |
| 174. | CDR-H1 of I2C | artificial | aa | KYAMN |
| 175. | CDR-H2 of I2C | artificial | aa | RIRSKYNNYATYYADSVKD |
| 176. | CDR-H3 of I2C | artificial | aa | HGNFGNSYISYWAY |
| 177. | VH of I2C | artificial | aa | EVQLVESGGGLVQPGGSLKLSCAASGFTFNKYAMNWVRQAPGKGLEWVARIRSKYNNYATYYADS |
| | | | | VKDRFTISRDDSKNTAYLQMNNLKTEDTAVYYCVRHGNFGNSYISYWAYWGQGTLVTVSS |
| 178. | VH of I2C | artificial | nt | GAGGTGCAGCTGGTCGAGTCTGGAGGAGGATTGGTGCAGCCTGGAGGGTCATTGAAACTCTCATG |
| | | | | TGCAGCCTCTGGATTCACCTTCAATAAGTACGCCATGAACTGGGTCCGCCAGGCTCCAGGAAAGG |
| | | | | GTTTGGAATGGGTTGCTCGCATAAGAAGTAAATATAATAATTATGCAACATATTATGCCGATTCA |
| | | | | GTGAAAGACAGGTTCACCATCTCCAGAGATGATTCAAAAAACACTGCCTATCTACAAATGAACAA |
| | | | | CTTGAAAACTGAGGACACTGCCGTGTACTACTGTGTGAGACATGGGAACTTCGGTAATAGCTACA |
| | | | | TATCCTACTGGGCTTACTGGGGCCAAGGGACTCTGGTCACCGTCTCCTCA |
| 179. | VL of I2C | artificial | aa | QTVVTQEPSLTVSPGGTVTLTCGSSTGAVTSGNYPNWVQQKPGQAPRGLIGGTKFLAPGTPARFS |
| | | | | GSLLGGKAALTLSGVQPEDEAEYYCVLWYSNRWVFGGGTKLTVL |
| 180. | VL of I2C | artificial | nt | CAGACTGTTGTGACTCAGGAACCTTCACTCACCGTATCACCTGGTGGAACAGTCACACTCACTTG |
| | | | | TGGCTCCTCGACTGGGGCTGTTACATCTGGCAACTACCCAAACTGGGTCCAACAAAAACCAGGTC |
| | | | | AGGCACCCCGTGGTCTAATAGGTGGGACTAAGTTCCTCGCCCCCGGTACTCCTGCCAGATTCTCA |
| | | | | GGCTCCCTGCTTGGAGGCAAGGCTGCCCTCACCCTCTCAGGGGTACAGCCAGAGGATGAGGCAGA |
| | | | | ATATTACTGTGTTCTATGGTACAGCAACCGCTGGGTGTTCGGTGGAGGAACCAAACTGACTGTCC |
| | | | | TA |
| 181. | VH-P of I2C | artificial | aa | EVQLLESGGGLVQPGGSLKLSCAASGFTFNKYAMNWVRQAPGKGLEWVARIRSKYNNYATYYADS |
| | | | | VKDRFTISRDDSKNTAYLQMNNLKTEDTAVYYCVRHGNFGNSYISYWAYWGQGTLVTVSS |
| 182. | VH-P of I2C | artificial | nt | GAGGTGCAGCTGCTCGAGTCTGGAGGAGGATTGGTGCAGCCTGGAGGGTCATTGAAACTCTCATG |
| | | | | TGCAGCCTCTGGATTCACCTTCAATAAGTACGCCATGAACTGGGTCCGCCAGGCTCCAGGAAAGG |
| | | | | GTTTGGAATGGGTTGCTCGCATAAGAAGTAAATATAATAATTATGCAACATATTATGCCGATTCA |
| | | | | GTGAAAGACAGGTTCACCATCTCCAGAGATGATTCAAAAAACACTGCCTATCTACAAATGAACAA |
| | | | | CTTGAAAACTGAGGACACTGCCGTGTACTACTGTGTGAGACATGGGAACTTCGGTAATAGCTACA |
| | | | | TATCCTACTGGGCTTACTGGGGCCAAGGGACTCTGGTCACCGTCTCCTCA |
| 183. | VL-P of I2C | artificial | aa | ELVVTQEPSLTVSPGGTVTLTCGSSTGAVTSGNYPNWVQQKPGQAPRGLIGGTKFLAPGTPARFS |
| | | | | GSLLGGKAALTLSGVQPEDEAEYYCVLWYSNRWVFGGGTKLTVL |
| 184. | VL-P of I2C | artificial | nt | GAGCTCGTTGTGACTCAGGAACCTTCACTCACCGTATCACCTGGTGGAACAGTCACACTCACTTG |
| | | | | TGGCTCCTCGACTGGGGCTGTTACATCTGGCAACTACCCAAACTGGGTCCAACAAAAACCAGGTC |
| | | | | AGGCACCCCGTGGTCTAATAGGTGGGACTAAGTTCCTCGCCCCCGGTACTCCTGCCAGATTCTCA |
| | | | | GGCTCCCTGCTTGGAGGCAAGGCTGCCCTCACCCTCTCAGGGGTACAGCCAGAGGATGAGGCAGA |
| | | | | ATATTACTGTGTTCTATGGTACAGCAACCGCTGGGTGTTCGGTGGAGGAACCAAACTGACTGTCC |
| | | | | TA |
| 185. | VH-VL of I2C | artificial | aa | EVQLVESGGGLVQPGGSLKLSCAASGFTFNKYAMNWVRQAPGKGLEWVARIRSKYNNYATYYADS |
| | | | | VKDRFTISRDDSKNTAYLQMNNLKTEDTAVYYCVRHGNFGNSYISYWAYWGQGTLVTVSSGGGGS |
| | | | | GGGGSGGGGSQTVVTQEPSLTVSPGGTVTLTCGSSTGAVTSGNYPNWVQQKPGQAPRGLIGGTKF |
| | | | | LAPGTPARFSGSLLGGKAALTLSGVQPEDEAEYYCVLWYSNRWVFGGGTKLTVL |
| 186. | VH-VL of I2C | artificial | nt | GAGGTGCAGCTGGTCGAGTCTGGAGGAGGATTGGTGCAGCCTGGAGGGTCATTGAAACTCTCATG |
| | | | | TGCAGCCTCTGGATTCACCTTCAATAAGTACGCCATGAACTGGGTCCGCCAGGCTCCAGGAAAGG |
| | | | | GTTTGGAATGGGTTGCTCGCATAAGAAGTAAATATAATAATTATGCAACATATTATGCCGATTCA |
| | | | | GTGAAAGACAGGTTCACCATCTCCAGAGATGATTCAAAAAACACTGCCTATCTACAAATGAACAA |
| | | | | CTTGAAAACTGAGGACACTGCCGTGTACTACTGTGTGAGACATGGGAACTTCGGTAATAGCTACA |
| | | | | TATCCTACTGGGCTTACTGGGGCCAAGGGACTCTGGTCACCGTCTCCTCAGGTGGTGGTGGTTCT |
| | | | | GGCGGCGGCGGCTCCGGTGGTGGTGGTTCTCAGACTGTTGTGACTCAGGAACCTTCACTCACCGT |
| | | | | ATCACCTGGTGGAACAGTCACACTCACTTGTGGCTCCTCGACTGGGGCTGTTACATCTGGCAACT |
| | | | | ACCCAAACTGGGTCCAACAAAAACCAGGTCAGGCACCCCGTGGTCTAATAGGTGGGACTAAGTTC |
| | | | | CTCGCCCCCGGTACTCCTGCCAGATTCTCAGGCTCCCTGCTTGGAGGCAAGGCTGCCCTCACCCT |
| | | | | CTCAGGGGTACAGCCAGAGGATGAGGCAGAATATTACTGTGTTCTATGGTACAGCAACCGCTGGG |
| | | | | TGTTCGGTGGAGGAACCAAACTGACTGTCCTA |
| 187. | VH-VL-P of I2C | artificial | aa | EVQLLESGGGLVQPGGSLKLSCAASGFTFNKYAMNWVRQAPGKGLEWVARIRSKYNNYATYYADS |
| | | | | VKDRFTISRDDSKNTAYLQMNNLKTEDTAVYYCVRHGNFGNSYISYWAYWGQGTLVTVSSGGGGS |
| | | | | GGGGSGGGGSELVVTQEPSLTVSPGGTVTLTCGSSTGAVTSGNYPNWVQQKPGQAPRGLIGGTKF |
| | | | | LAPGTPARFSGSLLGGKAALTLSGVQPEDEAEYYCVLWYSNRWVFGGGTKLTVL |
| 188. | VH-VL-P of I2C | artificial | nt | GAGGTGCAGCTGCTCGAGTCTGGAGGAGGATTGGTGCAGCCTGGAGGGTCATTGAAACTCTCATG |
| | | | | TGCAGCCTCTGGATTCACCTTCAATAAGTACGCCATGAACTGGGTCCGCCAGGCTCCAGGAAAGG |
| | | | | GTTTGGAATGGGTTGCTCGCATAAGAAGTAAATATAATAATTATGCAACATATTATGCCGATTCA |
| | | | | GTGAAAGACAGGTTCACCATCTCCAGAGATGATTCAAAAAACACTGCCTATCTACAAATGAACAA |
| | | | | CTTGAAAACTGAGGACACTGCCGTGTACTACTGTGTGAGACATGGGAACTTCGGTAATAGCTACA |
| | | | | TATCCTACTGGGCTTACTGGGGCCAAGGGACTCTGGTCACCGTCTCCTCAGGTGGTGGTGGTTCT |
| | | | | GGCGGCGGCGGCTCCGGTGGTGGTGGTTCTGAGCTCGTTGTGACTCAGGAACCTTCACTCACCGT |
| | | | | ATCACCTGGTGGAACAGTCACACTCACTTGTGGCTCCTCGACTGGGGCTGTTACATCTGGCAACT |
| | | | | ACCCAAACTGGGTCCAACAAAAACCAGGTCAGGCACCCCGTGGTCTAATAGGTGGGACTAAGTTC |
| | | | | CTCGCCCCCGGTACTCCTGCCAGATTCTCAGGCTCCCTGCTTGGAGGCAAGGCTGCCCTCACCCT |
| | | | | CTCAGGGGTACAGCCAGAGGATGAGGCAGAATATTACTGTGTTCTATGGTACAGCAACCGCTGGG |
| | | | | TGTTCGGTGGAGGAACCAAACTGACTGTCCTA |
| 189. | MCSP-G4 | artificial | aa | QVQLVQSGAEVKRPGASMKVSCKASGYTETNYYIHWVRQAPGQGLEWMGWINPNSGATNYAQKFQ |
| | VH-VL x | | | GRVTMTRDTSTSTVYMELSSLRSEDTAVYYCAKSWVSWFASWGQGTLVTVSSGGGGSGGGGSGGG |
| | H2C VH-VL | | | GSDIVMTQSPDSLAVSLGERATINCKSSQSVLNSSNNRNYLAWYQQKPGQPPKLLIYWASTRESG |
| | | | | VPDRFSGSGSGTDFTLTISGLQAEDVAVYYCQQHYSTPFTFGPGTKVDIKSGGGGSEVQLVESGG |
| | | | | GLVQPGGSLKLSCAASGFTFNKYAMNWVRQAPGKGLEWVARIRSKYNNYATYYADSVKDRFTISR |
| | | | | DDSKNTAYLQMNNLKTEDTAVYYCVRHGNFGNSYISYWAYWGQGTLVTVSSGGGGSGGGGSGGGG |
| | | | | SQTVVTQEPSLTVSPGGTVTLTCGSSTGAVTSGYYPNWVQQKPGQAPRGLIGGTKFLAPGTPARF |
| | | | | SGSLLGGKAALTLSGVQPEDEAEYYCALWYSNRWVFGGGTKLTVL |
| 190. | MCSP-G4 | artificial | nt | CAGGTGCAGCTGGTCCAGTCTGGGGCTGAGGTGAAGAGGCCTGGGGCCTCAATGAAGGTCTCCTG |
| | VH-VL x | | | CAAGGCTTCTGGGTACACCTTCACCAACTACTATATACACTGGGTGCGACAGGCCCCTGGACAAG |
| | H2C VH-VL | | | GTCTTGAGTGGATGGGTTGGATCAACCCTAACAGTGGTGCCACAAACTATGCACAGAAGTTCCAG |
| | | | | GGCAGAGTCACCATGACCAGGGACACGTCCACGAGCACAGTCTACATGGAGCTGAGCAGCCTGAG |
| | | | | ATCTGAGGACACGGCCGTGTATTACTGTGCGAAATCCTGGGTCTCCTGGTTTGCTTCCTGGGGTC |
| | | | | AAGGAACCTTGGTCACCGTCTCCTCAGGTGGTGGTGGTTCTGGCGGCGGCGGCTCCGGTGGTGGT |
| | | | | GGTTCTGATATCGTGATGACCCAGTCTCCAGACTCCCTGGCTGTGTCTCTGGGCGAGAGGGCCAC |
| | | | | CATCAACTGCAAGTCCAGCCAGAGTGTTTTAAACAGCTCCAACAATAGGAACTACTTAGCTTGGT |
| | | | | ACCAGCAGAAACCAGGACAGCCTCCTAAGCTGCTCATTTACTGGGCATCTACCCGGGAATCCGGG |
| | | | | GTCCCTGACCGATTCAGTGGCAGCGGGTCTGGGACAGATTTCACTCTCACCATCAGTGGCCTGCA |
| | | | | GGCTGAAGATGTGGCAGTTTATTACTGTCAGCAACATTATAGTACTCCATTCACTTTTGGCCCTG |
| | | | | GGACCAAAGTGGATATCAAATCCGGAGGTGGTGGATCCGAGGTGCAGCTGGTCGAGTCTGGAGGA |
| | | | | GGATTGGTGCAGCCTGGAGGGTCATTGAAACTCTCATGTGCAGCCTCTGGATTCACCTTCAATAA |
| | | | | GTACGCCATGAACTGGGTCCGCCAGGCTCCAGGAAAGGGTTTGGAATGGGTTGCTCGCATAAGAA |
| | | | | GTAAATATAATAATTATGCAACATATTATGCCGATTCAGTGAAAGACAGGTTCACCATCTCCAGA |
| | | | | GATGATTCAAAAAACACTGCCTATCTACAAATGAACAACTTGAAAACTGAGGACACTGCCGTGTA |
| | | | | CTACTGTGTGAGACATGGGAACTTCGGTAATAGCTACATATCCTACTGGGCTTACTGGGGCCAAG |
| | | | | GGACTCTGGTCACCGTCTCCTCAGGTGGTGGTGGTTCTGGCGGCGGCGGCTCCGGTGGTGGTGGT |
| | | | | TCTCAGACTGTTGTGACTCAGGAACCTTCACTCACCGTATCACCTGGTGGAACAGTCACACTCAC |
| | | | | TTGTGGCTCCTCGACTGGGGCTGTTACATCTGGCTACTACCCAAACTGGGTCCAACAAAAACCAG |
| | | | | GTCAGGCACCCCGTGGTCTAATAGGTGGGACTAAGTTCCTCGCCCCCGGTACTCCTGCCAGATTC |
| | | | | TCAGGCTCCCTGCTTGGAGGCAAGGCTGCCCTCACCCTCTCAGGGGTACAGCCAGAGGATGAGGC |
| | | | | AGAATATTACTGTGCTCTATGGTACAGCAACCGCTGGGTGTTCGGTGGAGGAACCAAACTGACTG |
| | | | | TCCTA |
| 191. | MCSP-G4 | artificial | aa | QVQLVQSGAEVKRPGASMKVSCKASGYTFTNYYIHWVRQAPGQGLEWMGWINPNSGATNYAQKFQ |
| | VH-VL x | | | GRVTMTRDTSTSTVYMELSSLRSEDTAVYYCAKSWVSWFASWGQGTLVTVSSGGGGSGGGGSGGG |
| | F12Q VH-VL | | | GSDIVMTQSPDSLAVSLGERATINCKSSQSVLNSSNNRNYLAWYQQKPGQPPKLLIYWASTRESG |
| | | | | VPDRFSGSGSGTDFTLTISGLQAEDVAVYYCQQHYSTPFTFGPGTKVDIKSGGGGSEVQLVESGG |
| | | | | GLVQPGGSLKLSCAASGFTFNSYAMNWVRQAPGKGLEWVARIRSKYNNYATYYADSVKGRFTISR |
| | | | | DDSKNTAYLQMNNLKTEDTAVYYCVRHGNFGNSYVSWWAYWGQGTLVTVSSGGGGSGGGGSGGGG |
| | | | | SQTVVTQEPSLTVSPGGTVTLTCGSSTGAVTSGNYPNWVQQKPGQAPRGLIGGTKFLAPGTPARF |
| | | | | SGSLLGGKAALTLSGVQPEDEAEYYCVLWYSNRWVFGGGTKLTVL |
| 192. | MCSP-G4 | artificial | nt | CAGGTGCAGCTGGTCCAGTCTGGGGCTGAGGTGAAGAGGCCTGGGGCCTCAATGAAGGTCTCCTG |
| | VH-VL x | | | CAAGGCTTCTGGGTACACCTTCACCAACTACTATATACACTGGGTGCGACAGGCCCCTGGACAAG |
| | F12Q VH-VL | | | GTCTTGAGTGGATGGGTTGGATCAACCCTAACAGTGGTGCCACAAACTATGCACAGAAGTTCCAG |
| | | | | GGCAGAGTCACCATGACCAGGGACACGTCCACGAGCACAGTCTACATGGAGCTGAGCAGCCTGAG |
| | | | | ATCTGAGGACACGGCCGTGTATTACTGTGCGAAATCCTGGGTCTCCTGGTTTGCTTCCTGGGGTC |
| | | | | AAGGAACCTTGGTCACCGTCTCCTCAGGTGGTGGTGGTTCTGGCGGCGGCGGCTCCGGTGGTGGT |
| | | | | GGTTCTGATATCGTGATGACCCAGTCTCCAGACTCCCTGGCTGTGTCTCTGGGCGAGAGGGCCAC |
| | | | | CATCAACTGCAAGTCCAGCCAGAGTGTTTTAAACAGCTCCAACAATAGGAACTACTTAGCTTGGT |
| | | | | ACCAGCAGAAACCAGGACAGCCTCCTAAGCTGCTCATTTACTGGGCATCTACCCGGGAATCCGGG |
| | | | | GTCCCTGACCGATTCAGTGGCAGCGGGTCTGGGACAGATTTCACTCTCACCATCAGTGGCCTGCA |
| | | | | GGCTGAAGATGTGGCAGTTTATTACTGTCAGCAACATTATAGTACTCCATTCACTTTTGGCCCTG |
| | | | | GGACCAAAGTGGATATCAAATCCGGAGGTGGTGGATCCGAGGTGCAGCTGGTCGAGTCTGGAGGA |
| | | | | GGATTGGTGCAGCCTGGAGGGTCATTGAAACTCTCATGTGCAGCCTCTGGATTCACCTTCAATAG |
| | | | | CTACGCCATGAACTGGGTCCGCCAGGCTCCAGGAAAGGGTTTGGAATGGGTTGCTCGCATAAGAA |
| | | | | GTAAATATAATAATTATGCAACATATTATGCCGATTCAGTGAAAGGCAGGTTCACCATCTCCAGA |
| | | | | GATGATTCAAAAAACACTGCCTATCTACAAATGAACAACTTGAAAACTGAGGACACTGCCGTGTA |
| | | | | CTACTGTGTGAGACATGGGAACTTCGGTAATAGCTACGTTTCCTGGTGGGCTTACTGGGGCCAAG |
| | | | | GGACTCTGGTCACCGTCTCCTCAGGTGGTGGTGGTTCTGGCGGCGGCGGCTCCGGTGGTGGTGGT |
| | | | | TCTCAGACTGTTGTGACTCAGGAACCTTCACTCACCGTATCACCTGGTGGAACAGTCACACTCAC |
| | | | | TTGTGGCTCCTCGACTGGGGCTGTTACATCTGGCAACTACCCAAACTGGGTCCAACAAAAACCAG |
| | | | | GTCAGGCACCCCGTGGTCTAATAGGTGGGACTAAGTTCCTCGCCCCCGGTACTCCTGCCAGATTC |
| | | | | TCAGGCTCCCTGCTTGGAGGCAAGGCTGCCCTCACCCTCTCAGGGGTACAGCCAGAGGATGAGGC |
| | | | | AGAATATTACTGTGTTCTATGGTACAGCAACCGCTGGGTGTTCGGTGGAGGAACCAAACTGACTG |
| | | | | TCCTA |
| 193. | MCSP-G4 | artificial | aa | QVQLVQSGAEVKRPGASMKVSCKASGYTFTNYYIHWVRQAPGQGLEWMGWINPNSGATNYAQKFQ |
| | VH-VL x | | | GRVTMTRDTSTSTVYMELSSLRSEDTAVYYCAKSWVSWFASWGQGTLVTVSSGGGGSGGGGSGGG |
| | I2C VH-VL | | | GSDIVMTQSPDSLAVSLGERATINCKSSQSVLNSSNNRNYLAWYQQKPGQPPKLLIYWASTRESG |
| | | | | VPDRFSGSGSGTDFTLTISGLQAEDVAVYYCQQHYSTPFTFGPGTKVDIKSGGGGSEVQLVESGG |
| | | | | GLVQPGGSLKLSCAASGFTFNKYAMNWVRQAPGKGLEWVARIRSKYNNYATYYADSVKDRFTISR |
| | | | | DDSKNTAYLQMNNLKTEDTAVYYCVRHGNFGNSYISYWAYWGQGTLVTVSSGGGGSGGGGSGGGG |
| | | | | SQTVVTQEPSLTVSPGGTVTLTCGSSTGAVTSGNYPNWVQQKPGQAPRGLIGGTKFLAPGTPARF |
| | | | | SGSLLGGKAALTLSGVQPEDEAEYYCVLWYSNRWVFGGGTKLTVL |
| 194. | MCSP-G4 | artificial | nt | CAGGTGCAGCTGGTCCAGTCTGGGGCTGAGGTGAAGAGGCCTGGGGCCTCAATGAAGGTCTCCTG |
| | VH-VL x | | | CAAGGCTTCTGGGTACACCTTCACCAACTACTATATACACTGGGTGCGACAGGCCCCTGGACAAG |
| | I2C VH-VL | | | GTCTTGAGTGGATGGGTTGGATCAACCCTAACAGTGGTGCCACAAACTATGCACAGAAGTTCCAG |
| | | | | GGCAGAGTCACCATGACCAGGGACACGTCCACGAGCACAGTCTACATGGAGCTGAGCAGCCTGAG |
| | | | | ATCTGAGGACACGGCCGTGTATTACTGTGCGAAATCCTGGGTCTCCTGGTTTGCTTCCTGGGGTC |
| | | | | AAGGAACCTTGGTCACCGTCTCCTCAGGTGGTGGTGGTTCTGGCGGCGGCGGCTCCGGTGGTGGT |
| | | | | GGTTCTGATATCGTGATGACCCAGTCTCCAGACTCCCTGGCTGTGTCTCTGGGCGAGAGGGCCAC |
| | | | | CATCAACTGCAAGTCCAGCCAGAGTGTTTTAAACAGCTCCAACAATAGGAACTACTTAGCTTGGT |
| | | | | ACCAGCAGAAACCAGGACAGCCTCCTAAGCTGCTCATTTACTGGGCATCTACCCGGGAATCCGGG |
| | | | | GTCCCTGACCGATTCAGTGGCAGCGGGTCTGGGACAGATTTCACTCTCACCATCAGTGGCCTGCA |
| | | | | GGCTGAAGATGTGGCAGTTTATTACTGTCAGCAACATTATAGTACTCCATTCACTTTTGGCCCTG |
| | | | | GGACCAAAGTGGATATCAAATCCGGAGGTGGTGGATCCGAGGTGCAGCTGGTCGAGTCTGGAGGA |
| | | | | GGATTGGTGCAGCCTGGAGGGTCATTGAAACTCTCATGTGCAGCCTCTGGATTCACCTTCAATAA |
| | | | | GTACGCCATGAACTGGGTCCGCCAGGCTCCAGGAAAGGGTTTGGAATGGGTTGCTCGCATAAGAA |
| | | | | GTAAATATAATAATTATGCAACATATTATGCCGATTCAGTGAAAGACAGGTTCACCATCTCCAGA |
| | | | | GATGATTCAAAAAACACTGCCTATCTACAAATGAACAACTTGAAAACTGAGGACACTGCCGTGTA |
| | | | | CTACTGTGTGAGACATGGGAACTTCGGTAATAGCTACATATCCTACTGGGCTTACTGGGGCCAAG |
| | | | | GGACTCTGGTCACCGTCTCCTCAGGTGGTGGTGGTTCTGGCGGCGGCGGCTCCGGTGGTGGTGGT |
| | | | | TCTCAGACTGTTGTGACTCAGGAACCTTCACTCACCGTATCACCTGGTGGAACAGTCACACTCAC |
| | | | | TTGTGGCTCCTCGACTGGGGCTGTTACATCTGGCAACTACCCAAACTGGGTCCAACAAAAACCAG |
| | | | | GTCAGGCACCCCGTGGTCTAATAGGTGGGACTAAGTTCCTCGCCCCCGGTACTCCTGCCAGATTC |
| | | | | TCAGGCTCCCTGCTTGGAGGCAAGGCTGCCCTCACCCTCTCAGGGGTACAGCCAGAGGATGAGGC |
| | | | | AGAATATTACTGTGTTCTATGGTACAGCAACCGCTGGGTGTTCGGTGGAGGAACCAAACTGACTG |
| | | | | TCCTA |
| 195. | MCSP-G4 | artificial | aa | QVQLVQSGAEVKRPGASMKVSCKASGYTFTNYYIHWVRQAPGQGLEWMGWINPNSGATNYAQKFQ |
| | VH-VL-P x | | | GRVTMTRDTSTSTVYMELSSLRSEDTAVYYCAKSWVSWFASWGQGTLVTVSSGGGGSGGGGSGGG |
| | F6A VH-VL-P | | | GSELVMTQSPDSLAVSLGERATINCKSSQSVLNSSNNRNYLAWYQQKPGQPPKLLIYWASTRESG |
| | | | | VPDRFSGSGSGTDFTLTISGLQAEDVAVYYCQQHYSTPFTFGPGTKVDIKSGGGGSEVQLLESGG |
| | | | | GLVQPGGSLKLSCAASGFTFNIYAMNWVRQAPGKGLEWVARIRSKYNNYATYYADSVKSRFTISR |
| | | | | DDSKNTAYLQMNNLKTEDTAVYYCVRHGNFGNSYVSFFAYWGQGTLVTVSSGGGGSGGGGSGGGG |
| | | | | SELVVTQEPSLTVSPGGTVTLTCGSSTGAVTSGYYPNWVQQKPGQAPRGLIGGTKFLAPGTPARF |
| | | | | SGSLLGGKAALTLSGVQPEDEAEYYCALWYSNRWVFGGGTKLTVL |
| 196. | MCSP-G4 | artificial | nt | CAGGTGCAGCTGGTCCAGTCTGGGGCTGAGGTGAAGAGGCCTGGGGCCTCAATGAAGGTCTCCTG |
| | VH-VL-P x | | | CAAGGCTTCTGGGTACACCTTCACCAACTACTATATACACTGGGTGCGACAGGCCCCTGGACAAG |
| | F6A VH-VL-P | | | GTCTTGAGTGGATGGGTTGGATCAACCCTAACAGTGGTGCCACAAACTATGCACAGAAGTTCCAG |
| | | | | GGCAGAGTCACCATGACCAGGGACACGTCCACGAGCACAGTCTACATGGAGCTGAGCAGCCTGAG |
| | | | | ATCTGAGGACACGGCCGTGTATTACTGTGCGAAATCCTGGGTCTCCTGGTTTGCTTCCTGGGGTC |
| | | | | AAGGAACCTTGGTCACCGTCTCCTCAGGTGGTGGTGGTTCTGGCGGCGGCGGCTCCGGTGGTGGT |
| | | | | GGTTCTGAGCTCGTGATGACCCAGTCTCCAGACTCCCTGGCTGTGTCTCTGGGCGAGAGGGCCAC |
| | | | | CATCAACTGCAAGTCCAGCCAGAGTGTTTTAAACAGCTCCAACAATAGGAACTACTTAGCTTGGT |
| | | | | ACCAGCAGAAACCAGGACAGCCTCCTAAGCTGCTCATTTACTGGGCATCTACCCGGGAATCCGGG |
| | | | | GTCCCTGACCGATTCAGTGGCAGCGGGTCTGGGACAGATTTCACTCTCACCATCAGTGGCCTGCA |
| | | | | GGCTGAAGATGTGGCAGTTTATTACTGTCAGCAACATTATAGTACTCCATTCACTTTTGGCCCTG |
| | | | | GGACCAAAGTGGATATCAAATCCGGAGGTGGTGGATCCGAGGTGCAGCTGCTCGAGTCTGGAGGA |
| | | | | GGATTGGTGCAGCCTGGAGGGTCATTGAAACTCTCATGTGCAGCCTCTGGATTCACCTTCAATAT |
| | | | | CTACGCCATGAACTGGGTCCGCCAGGCTCCAGGAAAGGGTTTGGAATGGGTTGCTCGCATAAGAA |
| | | | | GTAAATATAATAATTATGCAACATATTATGCCGATTCAGTGAAAAGCAGGTTCACCATCTCCAGA |
| | | | | GATGATTCAAAAAACACTGCCTATCTACAAATGAACAACTTGAAAACTGAGGACACTGCCGTGTA |
| | | | | CTACTGTGTGAGACATGGGAACTTCGGTAATAGCTACGTATCCTTCTTCGCTTACTGGGGCCAAG |
| | | | | GGACTCTGGTCACCGTCTCCTCAGGTGGTGGTGGTTCTGGCGGCGGCGGCTCCGGTGGTGGTGGT |
| | | | | TCTGAGCTCGTTGTGACTCAGGAACCTTCACTCACCGTATCACCTGGTGGAACAGTCACACTCAC |
| | | | | TTGTGGCTCCTCGACTGGGGCTGTTACATCTGGCTACTACCCAAACTGGGTCCAACAAAAACCAG |
| | | | | GTCAGGCACCCCGTGGTCTAATAGGTGGGACTAAGTTCCTCGCCCCCGGTACTCCTGCCAGATTC |
| | | | | TCAGGCTCCCTGCTTGGAGGCAAGGCTGCCCTCACCCTCTCAGGGGTACAGCCAGAGGATGAGGC |
| | | | | AGAATATTACTGTGCTCTATGGTACAGCAACCGCTGGGTGTTCGGTGGAGGAACCAAACTGACTG |
| | | | | TCCTA |
| 197. | MCSP-G4 | artificial | aa | QVQLVQSGAEVKRPGASMKVSCKASGYTFTNYYIHWVRQAPGQGLEWMGWINPNSGATNYAQKFQ |
| | VH-VL-P x | | | GRVTMTRDTSTSTVYMELSSLRSEDTAVYYCAKSWVSWFASWGQGTLVTVSSGGGGSGGGGSGGG |
| | H2C VH-VL-P | | | GSELVMTQSPDSLAVSLGERATINCKSSQSVLNSSNNRNYLAWYQQKPGQPPKLLIYWASTRESG |
| | | | | VPDRFSGSGSGTDFTLTISGLQAEDVAVYYCQQHYSTPFTFGPGTKVDIKSGGGGSEVQLLESGG |
| | | | | GLVQPGGSLKLSCAASGFTFNKYAMNWVRQAPGKGLEWVARIRSKYNNYATYYADSVKDRFTISR |
| | | | | DDSKNTAYLQMNNLKTEDTAVYYCVRHGNFGNSYISYWAYWGQGTLVTVSSGGGGSGGGGSGGGG |
| | | | | SELVVTQEPSLTVSPGGTVTLTCGSSTGAVTSGYYPNWVQQKPGQAPRGLIGGTKFLAPGTPARF |
| | | | | SGSLLGGKAALTLSGVQPEDEAEYYCALWYSNRWVFGGGTKLTVL |
| 198. | MCSP-G4 | artificial | nt | CAGGTGCAGCTGGTCCAGTCTGGGGCTGAGGTGAAGAGGCCTGGGGCCTCAATGAAGGTCTCCTG |
| | VH-VL-P x | | | CAAGGCTTCTGGGTACACCTTCACCAACTACTATATACACTGGGTGCGACAGGCCCCTGGACAAG |
| | H2C VH-VL-P | | | GTCTTGAGTGGATGGGTTGGATCAACCCTAACAGTGGTGCCACAAACTATGCACAGAAGTTCCAG |
| | | | | GGCAGAGTCACCATGACCAGGGACACGTCCACGAGCACAGTCTACATGGAGCTGAGCAGCCTGAG |
| | | | | ATCTGAGGACACGGCCGTGTATTACTGTGCGAAATCCTGGGTCTCCTGGTTTGCTTCCTGGGGTC |
| | | | | AAGGAACCTTGGTCACCGTCTCCTCAGGTGGTGGTGGTTCTGGCGGCGGCGGCTCCGGTGGTGGT |
| | | | | GGTTCTGAGCTCGTGATGACCCAGTCTCCAGACTCCCTGGCTGTGTCTCTGGGCGAGAGGGCCAC |
| | | | | CATCAACTGCAAGTCCAGCCAGAGTGTTTTAAACAGCTCCAACAATAGGAACTACTTAGCTTGGT |
| | | | | ACCAGCAGAAACCAGGACAGCCTCCTAAGCTGCTCATTTACTGGGCATCTACCCGGGAATCCGGG |
| | | | | GTCCCTGACCGATTCAGTGGCAGCGGGTCTGGGACAGATTTCACTCTCACCATCAGTGGCCTGCA |
| | | | | GGCTGAAGATGTGGCAGTTTATTACTGTCAGCAACATTATAGTACTCCATTCACTTTTGGCCCTG |
| | | | | GGACCAAAGTGGATATCAAATCCGGAGGTGGTGGATCCGAGGTGCAGCTGCTCGAGTCTGGAGGA |
| | | | | GGATTGGTGCAGCCTGGAGGGTCATTGAAACTCTCATGTGCAGCCTCTGGATTCACCTTCAATAA |
| | | | | GTACGCCATGAACTGGGTCCGCCAGGCTCCAGGAAAGGGTTTGGAATGGGTTGCTCGCATAAGAA |
| | | | | GTAAATATAATAATTATGCAACATATTATGCCGATTCAGTGAAAGACAGGTTCACCATCTCCAGA |
| | | | | GATGATTCAAAAAACACTGCCTATCTACAAATGAACAACTTGAAAACTGAGGACACTGCCGTGTA |
| | | | | CTACTGTGTGAGACATGGGAACTTCGGTAATAGCTACATATCCTACTGGGCTTACTGGGGCCAAG |
| | | | | GGACTCTGGTCACCGTCTCCTCAGGTGGTGGTGGTTCTGGCGGCGGCGGCTCCGGTGGTGGTGGT |
| | | | | TCTGAGCTCGTTGTGACTCAGGAACCTTCACTCACCGTATCACCTGGTGGAACAGTCACACTCAC |
| | | | | TTGTGGCTCCTCGACTGGGGCTGTTACATCTGGCTACTACCCAAACTGGGTCCAACAAAAACCAG |
| | | | | GTCAGGCACCCCGTGGTCTAATAGGTGGGACTAAGTTCCTCGCCCCCGGTACTCCTGCCAGATTC |
| | | | | TCAGGCTCCCTGCTTGGAGGCAAGGCTGCCCTCACCCTCTCAGGGGTACAGCCAGAGGATGAGGC |
| | | | | AGAATATTACTGTGCTCTATGGTACAGCAACCGCTGGGTGTTCGGTGGAGGAACCAAACTGACTG |
| | | | | TCCTA |
| 199. | MCSP-G4 | artificial | aa | QVQLVQSGAEVKRPGASMKVSCKASGYTFTNYYIHWVRQAPGQGLEWMGWINPNSGATNYAQKFQ |
| | VH-VL-P x | | | GRVTMTRDTSTSTVYMELSSLRSEDTAVYYCAKSWVSWFASWGQGTLVTVSSGGGGSGGGGSGGG |
| | H1E VH-VL-P | | | GSELVMTQSPDSLAVSLGERATINCKSSQSVLNSSNNRNYLAWYQQKPGQPPKLLIYWASTRESG |
| | | | | VPDRFSGSGSGTDFTLTISGLQAEDVAVYYCQQHYSTPFTFGPGTKVDIKSGGGGSEVQLLESGG |
| | | | | GLEQPGGSLKLSCAASGFTFNSYAMNWVRQAPGKGLEWVARIRSKYNNYATYYADSVKGRFTISR |
| | | | | DDSKNTAYLQMNNLKTEDTAVYYCVRHGNFGNSYLSFWAYWGQGTLVTVSSGGGGSGGGGSGGGG |
| | | | | SELVVTQEPSLTVSPGGTVTLTCGSSTGAVTSGYYPNWVQQKPGQAPRGLIGGTKFLAPGTPARF |
| | | | | SGSLLGGKAALTLSGVQPEDEAEYYCALWYSNRWVFGGGTKLTVL |
| 200. | MCSP-G4 | artificial | nt | CAGGTGCAGCTGGTCCAGTCTGGGGCTGAGGTGAAGAGGCCTGGGGCCTCAATGAAGGTCTCCTG |
| | VH-VL-P x | | | CAAGGCTTCTGGGTACACCTTCACCAACTACTATATACACTGGGTGCGACAGGCCCCTGGACAAG |
| | H1E VH-VL-P | | | GTCTTGAGTGGATGGGTTGGATCAACCCTAACAGTGGTGCCACAAACTATGCACAGAAGTTCCAG |
| | | | | GGCAGAGTCACCATGACCAGGGACACGTCCACGAGCACAGTCTACATGGAGCTGAGCAGCCTGAG |
| | | | | ATCTGAGGACACGGCCGTGTATTACTGTGCGAAATCCTGGGTCTCCTGGTTTGCTTCCTGGGGTC |
| | | | | AAGGAACCTTGGTCACCGTCTCCTCAGGTGGTGGTGGTTCTGGCGGCGGCGGCTCCGGTGGTGGT |
| | | | | GGTTCTGAGCTCGTGATGACCCAGTCTCCAGACTCCCTGGCTGTGTCTCTGGGCGAGAGGGCCAC |
| | | | | CATCAACTGCAAGTCCAGCCAGAGTGTTTTAAACAGCTCCAACAATAGGAACTACTTAGCTTGGT |
| | | | | ACCAGCAGAAACCAGGACAGCCTCCTAAGCTGCTCATTTACTGGGCATCTACCCGGGAATCCGGG |
| | | | | GTCCCTGACCGATTCAGTGGCAGCGGGTCTGGGACAGATTTCACTCTCACCATCAGTGGCCTGCA |
| | | | | GGCTGAAGATGTGGCAGTTTATTACTGTCAGCAACATTATAGTACTCCATTCACTTTTGGCCCTG |
| | | | | GGACCAAAGTGGATATCAAATCCGGAGGTGGTGGATCCGAGGTGCAGCTGCTCGAGTCTGGAGGA |
| | | | | GGATTGGAGCAGCCTGGAGGGTCATTGAAACTCTCATGTGCAGCCTCTGGATTCACCTTCAATTC |
| | | | | GTACGCCATGAACTGGGTCCGCCAGGCTCCAGGAAAGGGTTTGGAATGGGTTGCTCGCATAAGAA |
| | | | | GTAAATATAATAATTATGCAACATATTATGCCGATTCAGTGAAAGGGAGGTTCACCATCTCCAGA |
| | | | | GATGATTCAAAAAACACTGCCTATCTACAAATGAACAACTTGAAAACTGAGGACACTGCCGTGTA |
| | | | | CTACTGTGTGAGACATGGGAACTTCGGTAATAGCTACCTATCCTTCTGGGCTTACTGGGGCCAAG |
| | | | | GGACTCTGGTCACCGTCTCCTCAGGTGGTGGTGGTTCTGGCGGCGGCGGCTCCGGTGGTGGTGGT |
| | | | | TCTGAGCTCGTTGTGACTCAGGAACCTTCACTCACCGTATCACCTGGTGGAACAGTCACACTCAC |
| | | | | TTGTGGCTCCTCGACTGGGGCTGTTACATCTGGCTACTACCCAAACTGGGTCCAACAAAAACCAG |
| | | | | GTCAGGCACCCCGTGGTCTAATAGGTGGGACTAAGTTCCTCGCCCCCGGTACTCCTGCCAGATTC |
| | | | | TCAGGCTCCCTGCTTGGAGGCAAGGCTGCCCTCACCCTCTCAGGGGTACAGCCAGAGGATGAGGC |
| | | | | AGAATATTACTGTGCTCTATGGTACAGCAACCGCTGGGTGTTCGGTGGAGGAACCAAACTGACTG |
| | | | | TCCTA |
| 201. | MCSP-G4 | artificial | aa | QVQLVQSGAEVKRPGASMKVSCKASGYTFTNYYIHWVRQAPGQGLEWMGWINPNSGATNYAQKFQ |
| | VH-VL-P x | | | GRVTMTRDTSTSTVYMELSSLRSEDTAVYYCAKSWVSWFASWGQGTLVTVSSGGGGSGGGGSGGG |
| | G4H VH-VL-P | | | GSELVMTQSPDSLAVSLGERATINCKSSQSVLNSSNNRNYLAWYQQKPGQPPKLLIYWASTRESG |
| | | | | VPDRFSGSGSGTDFTLTISGLQAEDVAVYYCQQHYSTPFTFGPGTKVDIKSGGGGSEVQLLESGG |
| | | | | GLVQPGGSLKLSCAASGFTFNRYAMNWVRQAPGKGLEWVARIRSKYNNYATYYADSVKGRFTISR |
| | | | | DDSKNTAYLQMNNLKTEDTAVYYCVRHGNFGNSYLSYFAYWGQGTLVTVSSGGGGSGGGGSGGGG |
| | | | | SELVVTQEPSLTVSPGGTVTLTCGSSTGAVTSGYYPNWVQQKPGQAPRGLIGGTKFLAPGTPARF |
| | | | | SGSLLGGKAALTLSGVQPEDEAEYYCALWYSNRWVFGGGTKLTVL |
| 202. | MCSP-G4 | artificial | nt | CAGGTGCAGCTGGTCCAGTCTGGGGCTGAGGTGAAGAGGCCTGGGGCCTCAATGAAGGTCTCCTG |
| | VH-VL-P x | | | CAAGGCTTCTGGGTACACCTTCACCAACTACTATATACACTGGGTGCGACAGGCCCCTGGACAAG |
| | G4H VH-VL-P | | | GTCTTGAGTGGATGGGTTGGATCAACCCTAACAGTGGTGCCACAAACTATGCACAGAAGTTCCAG |
| | | | | GGCAGAGTCACCATGACCAGGGACACGTCCACGAGCACAGTCTACATGGAGCTGAGCAGCCTGAG |
| | | | | ATCTGAGGACACGGCCGTGTATTACTGTGCGAAATCCTGGGTCTCCTGGTTTGCTTCCTGGGGTC |
| | | | | AAGGAACCTTGGTCACCGTCTCCTCAGGTGGTGGTGGTTCTGGCGGCGGCGGCTCCGGTGGTGGT |
| | | | | GGTTCTGAGCTCGTGATGACCCAGTCTCCAGACTCCCTGGCTGTGTCTCTGGGCGAGAGGGCCAC |
| | | | | CATCAACTGCAAGTCCAGCCAGAGTGTTTTAAACAGCTCCAACAATAGGAACTACTTAGCTTGGT |
| | | | | ACCAGCAGAAACCAGGACAGCCTCCTAAGCTGCTCATTTACTGGGCATCTACCCGGGAATCCGGG |
| | | | | GTCCCTGACCGATTCAGTGGCAGCGGGTCTGGGACAGATTTCACTCTCACCATCAGTGGCCTGCA |
| | | | | GGCTGAAGATGTGGCAGTTTATTACTGTCAGCAACATTATAGTACTCCATTCACTTTTGGCCCTG |
| | | | | GGACCAAAGTGGATATCAAATCCGGAGGTGGTGGATCCGAGGTGCAGCTGCTCGAGTCTGGAGGA |
| | | | | GGATTGGTGCAGCCTGGAGGGTCATTGAAACTCTCATGTGCAGCCTCTGGATTCACCTTCAATCG |
| | | | | CTACGCCATGAACTGGGTCCGCCAGGCTCCAGGAAAGGGTTTGGAATGGGTTGCTCGCATAAGAA |
| | | | | GTAAATATAATAATTATGCAACATATTATGCCGATTCAGTGAAAGGGAGGTTCACCATCTCCAGA |
| | | | | GATGATTCAAAAAACACTGCCTATCTACAAATGAACAACTTGAAAACTGAGGACACTGCCGTGTA |
| | | | | CTACTGTGTGAGACATGGGAACTTCGGTAATAGCTACTTATCCTACTTCGCTTACTGGGGCCAAG |
| | | | | GGACTCTGGTCACCGTCTCCTCAGGTGGTGGTGGTTCTGGCGGCGGCGGCTCCGGTGGTGGTGGT |
| | | | | TCTGAGCTCGTTGTGACTCAGGAACCTTCACTCACCGTATCACCTGGTGGAACAGTCACACTCAC |
| | | | | TTGTGGCTCCTCGACTGGGGCTGTTACATCTGGCTACTACCCAAACTGGGTCCAACAAAAACCAG |
| | | | | GTCAGGCACCCCGTGGTCTAATAGGTGGGACTAAGTTCCTCGCCCCCGGTACTCCTGCCAGATTC |
| | | | | TCAGGCTCCCTGCTTGGAGGCAAGGCTGCCCTCACCCTCTCAGGGGTACAGCCAGAGGATGAGGC |
| | | | | AGAATATTACTGTGCTCTATGGTACAGCAACCGCTGGGTGTTCGGTGGAGGAACCAAACTGACTG |
| | | | | TCCTA |
| 203. | MCSP-G4 | artificial | aa | QVQLVQSGAEVKRPGASMKVSCKASGYTFTNYYIHWVRQAPGQGLEWMGWINPNSGATNYAQKFQ |
| | VH-VL-P x | | | GRVTMTRDTSTSTVYMELSSLRSEDTAVYYCAKSWVSWFASWGQGTLVTVSSGGGGSGGGGSGGG |
| | A2J VH-VL-P | | | GSELVMTQSPDSLAVSLGERATINCKSSQSVLNSSNNRNYLAWYQQKPGQPPKLLIYWASTRESG |
| | | | | VPDRFSGSGSGTDFTLTISGLQAEDVAVYYCQQHYSTPFTFGPGTKVDIKSGGGGSEVQLLESGG |
| | | | | GLVQPGGSLKLSCAASGFTFNVYAMNWVRQAPGKGLEWVARIRSKYNNYATYYADSVKKRFTISR |
| | | | | DDSKNTAYLQMNNLKTEDTAVYYCVRHGNFGNSYLSWWAYWGQGTLVTVSSGGGGSGGGGSGGGG |
| | | | | SELVVTQEPSLTVSPGGTVTLTCRSSTGAVTSGYYPNWVQQKPGQAPRGLIGATDMRPSGTPARF |
| | | | | SGSLLGGKAALTLSGVQPEDEAEYYCALWYSNRWVFGGGTKLTVL |
| 204. | MCSP-G4 | artificial | nt | CAGGTGCAGCTGGTCCAGTCTGGGGCTGAGGTGAAGAGGCCTGGGGCCTCAATGAAGGTCTCCTG |
| | VH-VL-P x | | | CAAGGCTTCTGGGTACACCTTCACCAACTACTATATACACTGGGTGCGACAGGCCCCTGGACAAG |
| | A2J VH-VL-P | | | GTCTTGAGTGGATGGGTTGGATCAACCCTAACAGTGGTGCCACAAACTATGCACAGAAGTTCCAG |
| | | | | GGCAGAGTCACCATGACCAGGGACACGTCCACGAGCACAGTCTACATGGAGCTGAGCAGCCTGAG |
| | | | | ATCTGAGGACACGGCCGTGTATTACTGTGCGAAATCCTGGGTCTCCTGGTTTGCTTCCTGGGGTC |
| | | | | AAGGAACCTTGGTCACCGTCTCCTCAGGTGGTGGTGGTTCTGGCGGCGGCGGCTCCGGTGGTGGT |
| | | | | GGTTCTGAGCTCGTGATGACCCAGTCTCCAGACTCCCTGGCTGTGTCTCTGGGCGAGAGGGCCAC |
| | | | | CATCAACTGCAAGTCCAGCCAGAGTGTTTTAAACAGCTCCAACAATAGGAACTACTTAGCTTGGT |
| | | | | ACCAGCAGAAACCAGGACAGCCTCCTAAGCTGCTCATTTACTGGGCATCTACCCGGGAATCCGGG |
| | | | | GTCCCTGACCGATTCAGTGGCAGCGGGTCTGGGACAGATTTCACTCTCACCATCAGTGGCCTGCA |
| | | | | GGCTGAAGATGTGGCAGTTTATTACTGTCAGCAACATTATAGTACTCCATTCACTTTTGGCCCTG |
| | | | | GGACCAAAGTGGATATCAAATCCGGAGGTGGTGGATCCGAGGTGCAGCTGCTCGAGTCTGGAGGA |
| | | | | GGATTGGTGCAGCCTGGAGGGTCATTGAAACTCTCATGTGCAGCCTCTGGATTCACCTTCAATGT |
| | | | | CTACGCCATGAACTGGGTCCGCCAGGCTCCAGGAAAGGGTTTGGAATGGGTTGCTCGCATAAGAA |
| | | | | GTAAATATAATAATTATGCAACATATTATGCCGATTCAGTGAAAAAGAGGTTCACCATCTCCAGA |
| | | | | GATGATTCAAAAAACACTGCCTATCTACAAATGAACAACTTGAAAACTGAGGACACTGCCGTGTA |
| | | | | CTACTGTGTGAGACATGGGAACTTCGGTAATAGCTACTTATCCTGGTGGGCTTACTGGGGCCAAG |
| | | | | GGACTCTGGTCACCGTCTCCTCAGGTGGTGGTGGTTCTGGCGGCGGCGGCTCCGGTGGTGGTGGT |
| | | | | TCTGAGCTCGTTGTGACTCAGGAACCTTCACTCACCGTATCACCTGGTGGAACAGTCACACTCAC |
| | | | | TTGTCGCTCCTCGACTGGGGCTGTTACATCTGGCTACTACCCAAACTGGGTCCAACAAAAACCAG |
| | | | | GTCAGGCACCCCGTGGTCTAATAGGTGCCACTGACATGAGGCCCTCTGGTACTCCTGCCAGATTC |
| | | | | TCAGGCTCCCTGCTTGGAGGCAAGGCTGCCCTCACCCTCTCAGGGGTACAGCCAGAGGATGAGGC |
| | | | | AGAATATTACTGTGCTCTATGGTACAGCAACCGCTGGGTGTTCGGTGGAGGAACCAAACTGACTG |
| | | | | TCCTA |
| 205. | MCSP-G4 | artificial | aa | QVQLVQSGAEVKRPGASMKVSCKASGYTFTNYYIHWVRQAPGQGLEWMGWINPNSGATNYAQKFQ |
| | VH-VL-P x | | | GRVTMTRDTSTSTVYMELSSLRSEDTAVYYCAKSWVSWFASWGQGTLVTVSSGGGGSGGGGSGGG |
| | E1L VH-VL-P | | | GSELVMTQSPDSLAVSLGERATINCKSSQSVLNSSNNRNYLAWYQQKPGQPPKLLIYWASTRESG |
| | | | | VPDRFSGSGSGTDFTLTISGLQAEDVAVYYCQQHYSTPFTFGPGTKVDIKSGGGGSEVQLLESGG |
| | | | | GLVQPGGSLKLSCAASGFTFNKYAMNWVRQAPGKGLEWVARIRSKYNNYATYYADSVKSRFTISR |
| | | | | DDSKNTAYLQMNNLKTEDTAVYYCVRHGNFGNSYTSYYAYWGQGTLVTVSSGGGGSGGGGSGGGG |
| | | | | SELVVTQEPSLTVSPGGTVTLTCGSSTGAVTSGYYPNWVQQKPGQAPRGLIGGTKFLAPGTPARF |
| | | | | SGSLLGGKAALTLSGVQPEDEAEYYCALWYSNRWVFGGGTKLTVL |
| 206. | MCSP-G4 | artificial | nt | CAGGTGCAGCTGGTCCAGTCTGGGGCTGAGGTGAAGAGGCCTGGGGCCTCAATGAAGGTCTCCTG |
| | VH-VL-P x | | | CAAGGCTTCTGGGTACACCTTCACCAACTACTATATACACTGGGTGCGACAGGCCCCTGGACAAG |
| | E1L VH-VL-P | | | GTCTTGAGTGGATGGGTTGGATCAACCCTAACAGTGGTGCCACAAACTATGCACAGAAGTTCCAG |
| | | | | GGCAGAGTCACCATGACCAGGGACACGTCCACGAGCACAGTCTACATGGAGCTGAGCAGCCTGAG |
| | | | | ATCTGAGGACACGGCCGTGTATTACTGTGCGAAATCCTGGGTCTCCTGGTTTGCTTCCTGGGGTC |
| | | | | AAGGAACCTTGGTCACCGTCTCCTCAGGTGGTGGTGGTTCTGGCGGCGGCGGCTCCGGTGGTGGT |
| | | | | GGTTCTGAGCTCGTGATGACCCAGTCTCCAGACTCCCTGGCTGTGTCTCTGGGCGAGAGGGCCAC |
| | | | | CATCAACTGCAAGTCCAGCCAGAGTGTTTTAAACAGCTCCAACAATAGGAACTACTTAGCTTGGT |
| | | | | ACCAGCAGAAACCAGGACAGCCTCCTAAGCTGCTCATTTACTGGGCATCTACCCGGGAATCCGGG |
| | | | | GTCCCTGACCGATTCAGTGGCAGCGGGTCTGGGACAGATTTCACTCTCACCATCAGTGGCCTGCA |
| | | | | GGCTGAAGATGTGGCAGTTTATTACTGTCAGCAACATTATAGTACTCCATTCACTTTTGGCCCTG |
| | | | | GGACCAAAGTGGATATCAAATCCGGAGGTGGTGGATCCGAGGTGCAGCTGCTCGAGTCTGGAGGA |
| | | | | GGATTGGTGCAGCCTGGAGGGTCATTGAAACTCTCATGTGCAGCCTCTGGATTCACCTTCAATAA |
| | | | | GTACGCCATGAACTGGGTCCGCCAGGCTCCAGGAAAGGGTTTGGAATGGGTTGCTCGCATAAGAA |
| | | | | GTAAATATAATAATTATGCAACATATTATGCCGATTCAGTGAAATCGAGGTTCACCATCTCCAGA |
| | | | | GATGATTCAAAAAACACTGCCTATCTACAAATGAACAACTTGAAAACTGAGGACACTGCCGTGTA |
| | | | | CTACTGTGTGAGACATGGGAACTTCGGTAATAGCTACACATCCTACTACGCTTACTGGGGCCAAG |
| | | | | GGACTCTGGTCACCGTCTCCTCAGGTGGTGGTGGTTCTGGCGGCGGCGGCTCCGGTGGTGGTGGT |
| | | | | TCTGAGCTCGTTGTGACTCAGGAACCTTCACTCACCGTATCACCTGGTGGAACAGTCACACTCAC |
| | | | | TTGTGGCTCCTCGACTGGGGCTGTTACATCTGGCTACTACCCAAACTGGGTCCAACAAAAACCAG |
| | | | | GTCAGGCACCCCGTGGTCTAATAGGTGGGACTAAGTTCCTCGCCCCCGGTACTCCTGCCAGATTC |
| | | | | TCAGGCTCCCTGCTTGGAGGCAAGGCTGCCCTCACCCTCTCAGGGGTACAGCCAGAGGATGAGGC |
| | | | | AGAATATTACTGTGCTCTATGGTACAGCAACCGCTGGGTGTTCGGTGGAGGAACCAAACTGACTG |
| | | | | TCCTA |
| 207. | MCSP-G4 | artificial | aa | QVQLVQSGAEVKRPGASMKVSCKASGYTFTNYYIHWVRQAPGQGLEWMGWINPNSGATNYAQKFQ |
| | VH-VL-P x | | | GRVTMTRDTSTSTVYMELSSLRSEDTAVYYCAKSWVSWFASWGQGTLVTVSSGGGGSGGGGSGGG |
| | E2M VH-VL-P | | | GSELVMTQSPDSLAVSLGERATINCKSSQSVLNSSNNRNYLAWYQQKPGQPPKLLIYWASTRESG |
| | | | | VPDRFSGSGSGTDFTLTISGLQAEDVAVYYCQQHYSTPFTFGPGTKVDIKSGGGGSEVQLLESGG |
| | | | | GLVQPGGSLKLSCAASGFTFNGYAMNWVRQAPGKGLEWVARIRSKYNNYATYYADSVKERFTISR |
| | | | | DDSKNTAYLQMNNLKTEDTAVYYCVRHRNFGNSYLSWFAYWGQGTLVTVSSGGGGSGGGGSGGGG |
| | | | | SELVVTQEPSLTVSPGGTVTLTCRSSTGAVTSGYYPNWVQQKPGQAPRGLIGATDMRPSGTPARF |
| | | | | SGSLLGGKAALTLSGVQPEDEAEYYCALWYSNRWVFGGGTKLTVL |
| 208. | MCSP-G4 | artificial | nt | CAGGTGCAGCTGGTCCAGTCTGGGGCTGAGGTGAAGAGGCCTGGGGCCTCAATGAAGGTCTCCTG |
| | VH-VL-P x | | | CAAGGCTTCTGGGTACACCTTCACCAACTACTATATACACTGGGTGCGACAGGCCCCTGGACAAG |
| | E2M VH-VL-P | | | GTCTTGAGTGGATGGGTTGGATCAACCCTAACAGTGGTGCCACAAACTATGCACAGAAGTTCCAG |
| | | | | GGCAGAGTCACCATGACCAGGGACACGTCCACGAGCACAGTCTACATGGAGCTGAGCAGCCTGAG |
| | | | | ATCTGAGGACACGGCCGTGTATTACTGTGCGAAATCCTGGGTCTCCTGGTTTGCTTCCTGGGGTC |
| | | | | AAGGAACCTTGGTCACCGTCTCCTCAGGTGGTGGTGGTTCTGGCGGCGGCGGCTCCGGTGGTGGT |
| | | | | GGTTCTGAGCTCGTGATGACCCAGTCTCCAGACTCCCTGGCTGTGTCTCTGGGCGAGAGGGCCAC |
| | | | | CATCAACTGCAAGTCCAGCCAGAGTGTTTTAAACAGCTCCAACAATAGGAACTACTTAGCTTGGT |
| | | | | ACCAGCAGAAACCAGGACAGCCTCCTAAGCTGCTCATTTACTGGGCATCTACCCGGGAATCCGGG |
| | | | | GTCCCTGACCGATTCAGTGGCAGCGGGTCTGGGACAGATTTCACTCTCACCATCAGTGGCCTGCA |
| | | | | GGCTGAAGATGTGGCAGTTTATTACTGTCAGCAACATTATAGTACTCCATTCACTTTTGGCCCTG |
| | | | | GGACCAAAGTGGATATCAAATCCGGAGGTGGTGGATCCGAGGTGCAGCTGCTCGAGTCTGGAGGA |
| | | | | GGATTGGTGCAGCCTGGAGGGTCATTGAAACTCTCATGTGCAGCCTCTGGATTCACCTTCAATGG |
| | | | | CTACGCCATGAACTGGGTCCGCCAGGCTCCAGGAAAGGGTTTGGAATGGGTTGCTCGCATAAGAA |
| | | | | GTAAATATAATAATTATGCAACATATTATGCCGATTCAGTGAAAGAGAGGTTCACCATCTCCAGA |
| | | | | GATGATTCAAAAAACACTGCCTATCTACAAATGAACAACTTGAAAACTGAGGACACTGCCGTGTA |
| | | | | CTACTGTGTGAGACATAGGAACTTCGGTAATAGCTACTTATCCTGGTTCGCTTACTGGGGCCAAG |
| | | | | GGACTCTGGTCACCGTCTCCTCAGGTGGTGGTGGTTCTGGCGGCGGCGGCTCCGGTGGTGGTGGT |
| | | | | TCTGAGCTCGTTGTGACTCAGGAACCTTCACTCACCGTATCACCTGGTGGAACAGTCACACTCAC |
| | | | | TTGTCGCTCCTCGACTGGGGCTGTTACATCTGGCTACTACCCAAACTGGGTCCAACAAAAACCAG |
| | | | | GTCAGGCACCCCGTGGTCTAATAGGTGCCACTGACATGAGGCCCTCTGGTACTCCTGCCAGATTC |
| | | | | TCAGGCTCCCTGCTTGGAGGCAAGGCTGCCCTCACCCTCTCAGGGGTACAGCCAGAGGATGAGGC |
| | | | | AGAATATTACTGTGCTCTATGGTACAGCAACCGCTGGGTGTTCGGTGGAGGAACCAAACTGACTG |
| | | | | TCCTA |
| 209. | MCSP-G4 | artificial | aa | QVQLVQSGAEVKRPGASMKVSCKASGYTFTNYYIHWVRQAPGQGLEWMGWINPNSGATNYAQKFQ |
| | VH-VL-P x | | | GRVTMTRDTSTSTVYMELSSLRSEDTAVYYCAKSWVSWFASWGQGTLVTVSSGGGGSGGGGSGGG |
| | F7O VH-VL-P | | | GSELVMTQSPDSLAVSLGERATINCKSSQSVLNSSNNRNYLAWYQQKPGQPPKLLIYWASTRESG |
| | | | | VPDRFSGSGSGTDFTLTISGLQAEDVAVYYCQQHYSTPFTFGPGTKVDIKSGGGGSEVQLLESGG |
| | | | | GLVQPGGSLKLSCAASGFTFNVYAMNWVRQAPGKGLEWVARIRSKYNNYATYYADSVKKRFTISR |
| | | | | DDSKNTAYLQMNNLKTEDTAVYYCVRHGNFGNSYISWWAYWGQGTLVTVSSGGGGSGGGGSGGGG |
| | | | | SELVVTQEPSLTVSPGGTVTLTCGSSTGAVTSGYYPNWVQQKPGQAPRGLIGGTKFLAPGTPARF |
| | | | | SGSLLGGKAALTLSGVQPEDEAEYYCALWYSNRWVFGGGTKLTVL |
| 210. | MCSP-G4 | artificial | nt | CAGGTGCAGCTGGTCCAGTCTGGGGCTGAGGTGAAGAGGCCTGGGGCCTCAATGAAGGTCTCCTG |
| | VH-VL-P x | | | CAAGGCTTCTGGGTACACCTTCACCAACTACTATATACACTGGGTGCGACAGGCCCCTGGACAAG |
| | F7O VH-VL-P | | | GTCTTGAGTGGATGGGTTGGATCAACCCTAACAGTGGTGCCACAAACTATGCACAGAAGTTCCAG |
| | | | | GGCAGAGTCACCATGACCAGGGACACGTCCACGAGCACAGTCTACATGGAGCTGAGCAGCCTGAG |
| | | | | ATCTGAGGACACGGCCGTGTATTACTGTGCGAAATCCTGGGTCTCCTGGTTTGCTTCCTGGGGTC |
| | | | | AAGGAACCTTGGTCACCGTCTCCTCAGGTGGTGGTGGTTCTGGCGGCGGCGGCTCCGGTGGTGGT |
| | | | | GGTTCTGAGCTCGTGATGACCCAGTCTCCAGACTCCCTGGCTGTGTCTCTGGGCGAGAGGGCCAC |
| | | | | CATCAACTGCAAGTCCAGCCAGAGTGTTTTAAACAGCTCCAACAATAGGAACTACTTAGCTTGGT |
| | | | | ACCAGCAGAAACCAGGACAGCCTCCTAAGCTGCTCATTTACTGGGCATCTACCCGGGAATCCGGG |
| | | | | GTCCCTGACCGATTCAGTGGCAGCGGGTCTGGGACAGATTTCACTCTCACCATCAGTGGCCTGCA |
| | | | | GGCTGAAGATGTGGCAGTTTATTACTGTCAGCAACATTATAGTACTCCATTCACTTTTGGCCCTG |
| | | | | GGACCAAAGTGGATATCAAATCCGGAGGTGGTGGATCCGAGGTGCAGCTGCTCGAGTCTGGAGGA |
| | | | | GGATTGGTGCAGCCTGGAGGGTCATTGAAACTCTCATGTGCAGCCTCTGGATTCACCTTCAATGT |
| | | | | GTACGCCATGAACTGGGTCCGCCAGGCTCCAGGAAAGGGTTTGGAATGGGTTGCTCGCATAAGAA |
| | | | | GTAAATATAATAATTATGCAACATATTATGCCGATTCAGTGAAAAAGAGGTTCACCATCTCCAGA |
| | | | | GATGATTCAAAAAACACTGCCTATCTACAAATGAACAACTTGAAAACTGAGGACACTGCCGTGTA |
| | | | | CTACTGTGTGAGACATGGGAACTTCGGTAATAGCTACATATCCTGGTGGGCTTACTGGGGCCAAG |
| | | | | GGACTCTGGTCACCGTCTCCTCAGGTGGTGGTGGTTCTGGCGGCGGCGGCTCCGGTGGTGGTGGT |
| | | | | TCTGAGCTCGTTGTGACTCAGGAACCTTCACTCACCGTATCACCTGGTGGAACAGTCACACTCAC |
| | | | | TTGTGGCTCCTCGACTGGGGCTGTTACATCTGGCTACTACCCAAACTGGGTCCAACAAAAACCAG |
| | | | | GTCAGGCACCCCGTGGTCTAATAGGTGGGACTAAGTTCCTCGCCCCCGGTACTCCTGCCAGATTC |
| | | | | TCAGGCTCCCTGCTTGGAGGCAAGGCTGCCCTCACCCTCTCAGGGGTACAGCCAGAGGATGAGGC |
| | | | | AGAATATTACTGTGCTCTATGGTACAGCAACCGCTGGGTGTTCGGTGGAGGAACCAAACTGACTG |
| | | | | TCCTA |
| 211. | MCSP-G4 | artificial | aa | QVQLVQSGAEVKRPGASMKVSCKASGYTFTNYYIHWVRQAPGQGLEWMGWINPNSGATNYAQKFQ |
| | VH-VL-P x | | | GRVTMTRDTSTSTVYMELSSLRSEDTAVYYCAKSWVSWFASWGQGTLVTVSSGGGGSGGGGSGGG |
| | F12Q VH-VL | | | GSELVMTQSPDSLAVSLGERATINCKSSQSVLNSSNNRNYLAWYQQKPGQPPKLLIYWASTRESG |
| | | | | VPDRFSGSGSGTDFTLTISGLQAEDVAVYYCQQHYSTPFTFGPGTKVDIKSGGGGSEVQLVESGG |
| | | | | GLVQPGGSLKLSCAASGFTFNSYAMNWVRQAPGKGLEWVARIRSKYNNYATYYADSVKGRFTISR |
| | | | | DDSKNTAYLQMNNLKTEDTAVYYCVRHGNFGNSYVSWWAYWGQGTLVTVSSGGGGSGGGGSGGGG |
| | | | | SQTVVTQEPSLTVSPGGTVTLTCGSSTGAVTSGNYPNWVQQKPGQAPRGLIGGTKFLAPGTPARF |
| | | | | SGSLLGGKAALTLSGVQPEDEAEYYCVLWYSNRWVFGGGTKLTVL |
| 212. | MCSP-G4 | artificial | nt | CAGGTGCAGCTGGTCCAGTCTGGGGCTGAGGTGAAGAGGCCTGGGGCCTCAATGAAGGTCTCCTG |
| | VH-VL-P x | | | CAAGGCTTCTGGGTACACCTTCACCAACTACTATATACACTGGGTGCGACAGGCCCCTGGACAAG |
| | F12Q VH-VL | | | GTCTTGAGTGGATGGGTTGGATCAACCCTAACAGTGGTGCCACAAACTATGCACAGAAGTTCCAG |
| | | | | GGCAGAGTCACCATGACCAGGGACACGTCCACGAGCACAGTCTACATGGAGCTGAGCAGCCTGAG |
| | | | | ATCTGAGGACACGGCCGTGTATTACTGTGCGAAATCCTGGGTCTCCTGGTTTGCTTCCTGGGGTC |
| | | | | AAGGAACCTTGGTCACCGTCTCCTCAGGTGGTGGTGGTTCTGGCGGCGGCGGCTCCGGTGGTGGT |
| | | | | GGTTCTGAGCTCGTGATGACCCAGTCTCCAGACTCCCTGGCTGTGTCTCTGGGCGAGAGGGCCAC |
| | | | | CATCAACTGCAAGTCCAGCCAGAGTGTTTTAAACAGCTCCAACAATAGGAACTACTTAGCTTGGT |
| | | | | ACCAGCAGAAACCAGGACAGCCTCCTAAGCTGCTCATTTACTGGGCATCTACCCGGGAATCCGGG |
| | | | | GTCCCTGACCGATTCAGTGGCAGCGGGTCTGGGACAGATTTCACTCTCACCATCAGTGGCCTGCA |
| | | | | GGCTGAAGATGTGGCAGTTTATTACTGTCAGCAACATTATAGTACTCCATTCACTTTTGGCCCTG |
| | | | | GGACCAAAGTGGATATCAAATCCGGAGGTGGTGGATCCGAGGTGCAGCTGGTCGAGTCTGGAGGA |
| | | | | GGATTGGTGCAGCCTGGAGGGTCATTGAAACTCTCATGTGCAGCCTCTGGATTCACCTTCAATAG |
| | | | | CTACGCCATGAACTGGGTCCGCCAGGCTCCAGGAAAGGGTTTGGAATGGGTTGCTCGCATAAGAA |
| | | | | GTAAATATAATAATTATGCAACATATTATGCCGATTCAGTGAAAGGCAGGTTCACCATCTCCAGA |
| | | | | GATGATTCAAAAAACACTGCCTATCTACAAATGAACAACTTGAAAACTGAGGACACTGCCGTGTA |
| | | | | CTACTGTGTGAGACATGGGAACTTCGGTAATAGCTACGTTTCCTGGTGGGCTTACTGGGGCCAAG |
| | | | | GGACTCTGGTCACCGTCTCCTCAGGTGGTGGTGGTTCTGGCGGCGGCGGCTCCGGTGGTGGTGGT |
| | | | | TCTCAGACTGTTGTGACTCAGGAACCTTCACTCACCGTATCACCTGGTGGAACAGTCACACTCAC |
| | | | | TTGTGGCTCCTCGACTGGGGCTGTTACATCTGGCAACTACCCAAACTGGGTCCAACAAAAACCAG |
| | | | | GTCAGGCACCCCGTGGTCTAATAGGTGGGACTAAGTTCCTCGCCCCCGGTACTCCTGCCAGATTC |
| | | | | TCAGGCTCCCTGCTTGGAGGCAAGGCTGCCCTCACCCTCTCAGGGGTACAGCCAGAGGATGAGGC |
| | | | | AGAATATTACTGTGTTCTATGGTACAGCAACCGCTGGGTGTTCGGTGGAGGAACCAAACTGACTG |
| | | | | TCCTA |
| 213. | MCSP-G4 | artificial | aa | QVQLVQSGAEVKRPGASMKVSCKASGYTFTNYYIHWVRQAPGQGLEWMGWINPNSGATNYAQKFQ |
| | VH-VL-P x | | | GRVTMTRDTSTSTVYMELSSLRSEDTAVYYCAKSWVSWFASWGQGTLVTVSSGGGGSGGGGSGGG |
| | I2C VH-VL | | | GSELVMTQSPDSLAVSLGERATINCKSSQSVLNSSNNRNYLAWYQQKPGQPPKLLIYWASTRESG |
| | | | | VPDRFSGSGSGTDFTLTISGLQAEDVAVYYCQQHYSTPFTFGPGTKVDIKSGGGGSEVQLVESGG |
| | | | | GLVQPGGSLKLSCAASGFTFNKYAMNWVRQAPGKGLEWVARIRSKYNNYATYYADSVKDRFTISR |
| | | | | DDSKNTAYLQMNNLKTEDTAVYYCVRHGNFGNSYISYWAYWGQGTLVTVSSGGGGSGGGGSGGGG |
| | | | | SQTVVTQEPSLTVSPGGTVTLTCGSSTGAVTSGNYPNWVQQKPGQAPRGLIGGTKFLAPGTPARF |
| | | | | SGSLLGGKAALTLSGVQPEDEAEYYCVLWYSNRWVFGGGTKLTVL |
| 214. | MCSP-G4 | artificial | nt | CAGGTGCAGCTGGTCCAGTCTGGGGCTGAGGTGAAGAGGCCTGGGGCCTCAATGAAGGTCTCCTG |
| | VH-VL-P x | | | CAAGGCTTCTGGGTACACCTTCACCAACTACTATATACACTGGGTGCGACAGGCCCCTGGACAAG |
| | I2C VH-VL | | | GTCTTGAGTGGATGGGTTGGATCAACCCTAACAGTGGTGCCACAAACTATGCACAGAAGTTCCAG |
| | | | | GGCAGAGTCACCATGACCAGGGACACGTCCACGAGCACAGTCTACATGGAGCTGAGCAGCCTGAG |
| | | | | ATCTGAGGACACGGCCGTGTATTACTGTGCGAAATCCTGGGTCTCCTGGTTTGCTTCCTGGGGTC |
| | | | | AAGGAACCTTGGTCACCGTCTCCTCAGGTGGTGGTGGTTCTGGCGGCGGCGGCTCCGGTGGTGGT |
| | | | | GGTTCTGAGCTCGTGATGACCCAGTCTCCAGACTCCCTGGCTGTGTCTCTGGGCGAGAGGGCCAC |
| | | | | CATCAACTGCAAGTCCAGCCAGAGTGTTTTAAACAGCTCCAACAATAGGAACTACTTAGCTTGGT |
| | | | | ACCAGCAGAAACCAGGACAGCCTCCTAAGCTGCTCATTTACTGGGCATCTACCCGGGAATCCGGG |
| | | | | GTCCCTGACCGATTCAGTGGCAGCGGGTCTGGGACAGATTTCACTCTCACCATCAGTGGCCTGCA |
| | | | | GGCTGAAGATGTGGCAGTTTATTACTGTCAGCAACATTATAGTACTCCATTCACTTTTGGCCCTG |
| | | | | GGACCAAAGTGGATATCAAATCCGGAGGTGGTGGATCCGAGGTGCAGCTGGTCGAGTCTGGAGGA |
| | | | | GGATTGGTGCAGCCTGGAGGGTCATTGAAACTCTCATGTGCAGCCTCTGGATTCACCTTCAATAA |
| | | | | GTACGCCATGAACTGGGTCCGCCAGGCTCCAGGAAAGGGTTTGGAATGGGTTGCTCGCATAAGAA |
| | | | | GTAAATATAATAATTATGCAACATATTATGCCGATTCAGTGAAAGACAGGTTCACCATCTCCAGA |
| | | | | GATGATTCAAAAAACACTGCCTATCTACAAATGAACAACTTGAAAACTGAGGACACTGCCGTGTA |
| | | | | CTACTGTGTGAGACATGGGAACTTCGGTAATAGCTACATATCCTACTGGGCTTACTGGGGCCAAG |
| | | | | GGACTCTGGTCACCGTCTCCTCAGGTGGTGGTGGTTCTGGCGGCGGCGGCTCCGGTGGTGGTGGT |
| | | | | TCTCAGACTGTTGTGACTCAGGAACCTTCACTCACCGTATCACCTGGTGGAACAGTCACACTCAC |
| | | | | TTGTGGCTCCTCGACTGGGGCTGTTACATCTGGCAACTACCCAAACTGGGTCCAACAAAAACCAG |
| | | | | GTCAGGCACCCCGTGGTCTAATAGGTGGGACTAAGTTCCTCGCCCCCGGTACTCCTGCCAGATTC |
| | | | | TCAGGCTCCCTGCTTGGAGGCAAGGCTGCCCTCACCCTCTCAGGGGTACAGCCAGAGGATGAGGC |
| | | | | AGAATATTACTGTGTTCTATGGTACAGCAACCGCTGGGTGTTCGGTGGAGGAACCAAACTGACTG |
| | | | | TCCTA |
| 215. | MCSP-D2 | artificial | aa | QVQLVQSGAEVKKPGASVKVSCKASGYTFTGYYMHWVRQAPGQGLEWMGWINPNSGGTSYAQKFQ |
| | VH-VL x | | | GRVTMTRDTSTSTVYMELSNLRSDDTAVYYCAKSWVSWFASWGQGTLVTVSSGGGGSGGGGSGGG |
| | H2C VH-VL | | | GSDIVMTQSPDSLAVSLGERATINCKSSQSVLNSSNNRNYLAWYQQKPGQPPKLLIYWASTRESG |
| | | | | VPDRFSGSGSGTDFTLTISGLQAEDVAVYYCQQHYSTPFTFGPGTKVDIKSGGGGSEVQLVESGG |
| | | | | GLVQPGGSLKLSCAASGFTFNKYAMNWVRQAPGKGLEWVARIRSKYNNYATYYADSVKDRFTISR |
| | | | | DDSKNTAYLQMNNLKTEDTAVYYCVRHGNFGNSYISYWAYWGQGTLVTVSSGGGGSGGGGSGGGG |
| | | | | SQTVVTQEPSLTVSPGGTVTLTCGSSTGAVTSGYYPNWVQQKPGQAPRGLIGGTKFLAPGTPARF |
| | | | | SGSLLGGKAALTLSGVQPEDEAEYYCALWYSNRWVFGGGTKLTVL |
| 216. | MCSP-D2 | artificial | nt | CAGGTGCAGCTGGTCCAGTCTGGGGCTGAGGTGAAGAAGCCTGGGGCCTCAGTGAAGGTCTCCTG |
| | VH-VL x | | | CAAGGCTTCTGGATACACCTTCACCGGCTACTATATGCACTGGGTGCGACAGGCCCCTGGACAAG |
| | H2C VH-VL | | | GGCTTGAGTGGATGGGATGGATCAACCCTAACAGTGGTGGCACAAGCTACGCACAGAAGTTCCAG |
| | | | | GGCAGAGTCACCATGACTAGGGACACGTCCACGAGCACAGTCTACATGGAGCTGAGCAACCTGAG |
| | | | | ATCTGACGACACGGCCGTGTATTACTGTGCGAAATCCTGGGTCTCCTGGTTTGCTTCCTGGGGTC |
| | | | | AAGGAACCTTGGTCACCGTCTCCTCAGGTGGTGGTGGTTCTGGCGGCGGCGGCTCCGGTGGTGGT |
| | | | | GGTTCTGATATCGTGATGACCCAGTCTCCAGACTCCCTGGCTGTGTCTCTGGGCGAGAGGGCCAC |
| | | | | CATCAACTGCAAGTCCAGCCAGAGTGTTTTAAACAGCTCCAACAATAGGAACTACTTAGCTTGGT |
| | | | | ACCAGCAGAAACCAGGACAGCCTCCTAAGCTGCTCATTTACTGGGCATCTACCCGGGAATCCGGG |
| | | | | GTCCCTGACCGATTCAGTGGCAGCGGGTCTGGGACAGATTTCACTCTCACCATCAGTGGCCTGCA |
| | | | | GGCTGAAGATGTGGCAGTTTATTACTGTCAGCAACATTATAGTACTCCATTCACTTTTGGCCCTG |
| | | | | GGACCAAAGTGGATATCAAATCCGGAGGTGGTGGATCCGAGGTGCAGCTGGTCGAGTCTGGAGGA |
| | | | | GGATTGGTGCAGCCTGGAGGGTCATTGAAACTCTCATGTGCAGCCTCTGGATTCACCTTCAATAA |
| | | | | GTACGCCATGAACTGGGTCCGCCAGGCTCCAGGAAAGGGTTTGGAATGGGTTGCTCGCATAAGAA |
| | | | | GTAAATATAATAATTATGCAACATATTATGCCGATTCAGTGAAAGACAGGTTCACCATCTCCAGA |
| | | | | GATGATTCAAAAAACACTGCCTATCTACAAATGAACAACTTGAAAACTGAGGACACTGCCGTGTA |
| | | | | CTACTGTGTGAGACATGGGAACTTCGGTAATAGCTACATATCCTACTGGGCTTACTGGGGCCAAG |
| | | | | GGACTCTGGTCACCGTCTCCTCAGGTGGTGGTGGTTCTGGCGGCGGCGGCTCCGGTGGTGGTGGT |
| | | | | TCTCAGACTGTTGTGACTCAGGAACCTTCACTCACCGTATCACCTGGTGGAACAGTCACACTCAC |
| | | | | TTGTGGCTCCTCGACTGGGGCTGTTACATCTGGCTACTACCCAAACTGGGTCCAACAAAAACCAG |
| | | | | GTCAGGCACCCCGTGGTCTAATAGGTGGGACTAAGTTCCTCGCCCCCGGTACTCCTGCCAGATTC |
| | | | | TCAGGCTCCCTGCTTGGAGGCAAGGCTGCCCTCACCCTCTCAGGGGTACAGCCAGAGGATGAGGC |
| | | | | AGAATATTACTGTGCTCTATGGTACAGCAACCGCTGGGTGTTCGGTGGAGGAACCAAACTGACTG |
| | | | | TCCTA |
| 217. | MCSP-D2 | artificial | aa | QVQLVQSGAEVKKPGASVKVSCKASGYTFTGYYMHWVRQAPGQGLEWMGWINPNSGGTSYAQKFQ |
| | VH-VL x | | | GRVTMTRDTSTSTVYMELSNLRSDDTAVYYCAKSWVSWFASWGQGTLVTVSSGGGGSGGGGSGGG |
| | F12Q VH-VL | | | GSDIVMTQSPDSLAVSLGERATINCKSSQSVLNSSNNRNYLAWYQQKPGQPPKLLIYWASTRESG |
| | | | | VPDRFSGSGSGTDFTLTISGLQAEDVAVYYCQQHYSTPFTFGPGTKVDIKSGGGGSEVQLVESGG |
| | | | | GLVQPGGSLKLSCAASGFTFNSYAMNWVRQAPGKGLEWVARIRSKYNNYATYYADSVKGRFTISR |
| | | | | DDSKNTAYLQMNNLKTEDTAVYYCVRHGNFGNSYVSWWAYWGQGTLVTVSSGGGGSGGGGSGGGG |
| | | | | SQTVVTQEPSLTVSPGGTVTLTCGSSTGAVTSGNYPNWVQQKPGQAPRGLIGGTKFLAPGTPARF |
| | | | | SGSLLGGKAALTLSGVQPEDEAEYYCVLWYSNRWVFGGGTKLTVL |
| 218. | MCSP-D2 | artificial | nt | CAGGTGCAGCTGGTCCAGTCTGGGGCTGAGGTGAAGAAGCCTGGGGCCTCAGTGAAGGTCTCCTG |
| | VH-VL x | | | CAAGGCTTCTGGATACACCTTCACCGGCTACTATATGCACTGGGTGCGACAGGCCCCTGGACAAG |
| | F12Q VH-VL | | | GGCTTGAGTGGATGGGATGGATCAACCCTAACAGTGGTGGCACAAGCTACGCACAGAAGTTCCAG |
| | | | | GGCAGAGTCACCATGACTAGGGACACGTCCACGAGCACAGTCTACATGGAGCTGAGCAACCTGAG |
| | | | | ATCTGACGACACGGCCGTGTATTACTGTGCGAAATCCTGGGTCTCCTGGTTTGCTTCCTGGGGTC |
| | | | | AAGGAACCTTGGTCACCGTCTCCTCAGGTGGTGGTGGTTCTGGCGGCGGCGGCTCCGGTGGTGGT |
| | | | | GGTTCTGATATCGTGATGACCCAGTCTCCAGACTCCCTGGCTGTGTCTCTGGGCGAGAGGGCCAC |
| | | | | CATCAACTGCAAGTCCAGCCAGAGTGTTTTAAACAGCTCCAACAATAGGAACTACTTAGCTTGGT |
| | | | | ACCAGCAGAAACCAGGACAGCCTCCTAAGCTGCTCATTTACTGGGCATCTACCCGGGAATCCGGG |
| | | | | GTCCCTGACCGATTCAGTGGCAGCGGGTCTGGGACAGATTTCACTCTCACCATCAGTGGCCTGCA |
| | | | | GGCTGAAGATGTGGCAGTTTATTACTGTCAGCAACATTATAGTACTCCATTCACTTTTGGCCCTG |
| | | | | GGACCAAAGTGGATATCAAATCCGGAGGTGGTGGATCCGAGGTGCAGCTGGTCGAGTCTGGAGGA |
| | | | | GGATTGGTGCAGCCTGGAGGGTCATTGAAACTCTCATGTGCAGCCTCTGGATTCACCTTCAATAG |
| | | | | CTACGCCATGAACTGGGTCCGCCAGGCTCCAGGAAAGGGTTTGGAATGGGTTGCTCGCATAAGAA |
| | | | | GTAAATATAATAATTATGCAACATATTATGCCGATTCAGTGAAAGGCAGGTTCACCATCTCCAGA |
| | | | | GATGATTCAAAAAACACTGCCTATCTACAAATGAACAACTTGAAAACTGAGGACACTGCCGTGTA |
| | | | | CTACTGTGTGAGACATGGGAACTTCGGTAATAGCTACGTTTCCTGGTGGGCTTACTGGGGCCAAG |
| | | | | GGACTCTGGTCACCGTCTCCTCAGGTGGTGGTGGTTCTGGCGGCGGCGGCTCCGGTGGTGGTGGT |
| | | | | TCTCAGACTGTTGTGACTCAGGAACCTTCACTCACCGTATCACCTGGTGGAACAGTCACACTCAC |
| | | | | TTGTGGCTCCTCGACTGGGGCTGTTACATCTGGCAACTACCCAAACTGGGTCCAACAAAAACCAG |
| | | | | GTCAGGCACCCCGTGGTCTAATAGGTGGGACTAAGTTCCTCGCCCCCGGTACTCCTGCCAGATTC |
| | | | | TCAGGCTCCCTGCTTGGAGGCAAGGCTGCCCTCACCCTCTCAGGGGTACAGCCAGAGGATGAGGC |
| | | | | AGAATATTACTGTGTTCTATGGTACAGCAACCGCTGGGTGTTCGGTGGAGGAACCAAACTGACTG |
| | | | | TCCTA |
| 219. | MCSP-D2 | artificial | aa | QVQLVQSGAEVKKPGASVKVSCKASGYTFTGYYMHWVRQAPGQGLEWMGWINPNSGGTSYAQKFQ |
| | VH-VL x | | | GRVTMTRDTSTSTVYMELSNLRSDDTAVYYCAKSWVSWFASWGQGTLVTVSSGGGGSGGGGSGGG |
| | I2C VH-VL | | | GSDIVMTQSPDSLAVSLGERATINCKSSQSVLNSSNNRNYLAWYQQKPGQPPKLLIYWASTRESG |
| | | | | VPDRFSGSGSGTDFTLTISGLQAEDVAVYYCQQHYSTPFTFGPGTKVDIKSGGGGSEVQLVESGG |
| | | | | GLVQPGGSLKLSCAASGFTFNKYAMNWVRQAPGKGLEWVARIRSKYNNYATYYADSVKDRFTISR |
| | | | | DDSKNTAYLQMNNLKTEDTAVYYCVRHGNFGNSYISYWAYWGQGTLVTVSSGGGGSGGGGSGGGG |
| | | | | SQTVVTQEPSLTVSPGGTVTLTCGSSTGAVTSGNYPNWVQQKPGQAPRGLIGGTKFLAPGTPARF |
| | | | | SGSLLGGKAALTLSGVQPEDEAEYYCVLWYSNRWVFGGGTKLTVL |
| 220. | MCSP-D2 | artificial | nt | CAGGTGCAGCTGGTCCAGTCTGGGGCTGAGGTGAAGAAGCCTGGGGCCTCAGTGAAGGTCTCCTG |
| | VH-VL x | | | CAAGGCTTCTGGATACACCTTCACCGGCTACTATATGCACTGGGTGCGACAGGCCCCTGGACAAG |
| | I2C VH-VL | | | GGCTTGAGTGGATGGGATGGATCAACCCTAACAGTGGTGGCACAAGCTACGCACAGAAGTTCCAG |
| | | | | GGCAGAGTCACCATGACTAGGGACACGTCCACGAGCACAGTCTACATGGAGCTGAGCAACCTGAG |
| | | | | ATCTGACGACACGGCCGTGTATTACTGTGCGAAATCCTGGGTCTCCTGGTTTGCTTCCTGGGGTC |
| | | | | AAGGAACCTTGGTCACCGTCTCCTCAGGTGGTGGTGGTTCTGGCGGCGGCGGCTCCGGTGGTGGT |
| | | | | GGTTCTGATATCGTGATGACCCAGTCTCCAGACTCCCTGGCTGTGTCTCTGGGCGAGAGGGCCAC |
| | | | | CATCAACTGCAAGTCCAGCCAGAGTGTTTTAAACAGCTCCAACAATAGGAACTACTTAGCTTGGT |
| | | | | ACCAGCAGAAACCAGGACAGCCTCCTAAGCTGCTCATTTACTGGGCATCTACCCGGGAATCCGGG |
| | | | | GTCCCTGACCGATTCAGTGGCAGCGGGTCTGGGACAGATTTCACTCTCACCATCAGTGGCCTGCA |
| | | | | GGCTGAAGATGTGGCAGTTTATTACTGTCAGCAACATTATAGTACTCCATTCACTTTTGGCCCTG |
| | | | | GGACCAAAGTGGATATCAAATCCGGAGGTGGTGGATCCGAGGTGCAGCTGGTCGAGTCTGGAGGA |
| | | | | GGATTGGTGCAGCCTGGAGGGTCATTGAAACTCTCATGTGCAGCCTCTGGATTCACCTTCAATAA |
| | | | | GTACGCCATGAACTGGGTCCGCCAGGCTCCAGGAAAGGGTTTGGAATGGGTTGCTCGCATAAGAA |
| | | | | GTAAATATAATAATTATGCAACATATTATGCCGATTCAGTGAAAGACAGGTTCACCATCTCCAGA |
| | | | | GATGATTCAAAAAACACTGCCTATCTACAAATGAACAACTTGAAAACTGAGGACACTGCCGTGTA |
| | | | | CTACTGTGTGAGACATGGGAACTTCGGTAATAGCTACATATCCTACTGGGCTTACTGGGGCCAAG |
| | | | | GGACTCTGGTCACCGTCTCCTCAGGTGGTGGTGGTTCTGGCGGCGGCGGCTCCGGTGGTGGTGGT |
| | | | | TCTCAGACTGTTGTGACTCAGGAACCTTCACTCACCGTATCACCTGGTGGAACAGTCACACTCAC |
| | | | | TTGTGGCTCCTCGACTGGGGCTGTTACATCTGGCAACTACCCAAACTGGGTCCAACAAAAACCAG |
| | | | | GTCAGGCACCCCGTGGTCTAATAGGTGGGACTAAGTTCCTCGCCCCCGGTACTCCTGCCAGATTC |
| | | | | TCAGGCTCCCTGCTTGGAGGCAAGGCTGCCCTCACCCTCTCAGGGGTACAGCCAGAGGATGAGGC |
| | | | | AGAATATTACTGTGTTCTATGGTACAGCAACCGCTGGGTGTTCGGTGGAGGAACCAAACTGACTG |
| | | | | TCCTA |
| 221. | MCSP-D2 | artificial | aa | QVQLVQSGAEVKKPGASVKVSCKASGYTFTGYYMHWVRQAPGQGLEWMGWINPNSGGTSYAQKFQ |
| | VH-VL-P x | | | GRVTMTRDTSTSTVYMELSNLRSDDTAVYYCAKSWVSWFASWGQGTLVTVSSGGGGSGGGGSGGG |
| | H2C VH-VL-P | | | GSELVMTQSPDSLAVSLGERATINCKSSQSVLNSSNNRNYLAWYQQKPGQPPKLLIYWASTRESG |
| | | | | VPDRFSGSGSGTDFTLTISGLQAEDVAVYYCQQHYSTPFTFGPGTKVDIKSGGGGSEVQLLESGG |
| | | | | GLVQPGGSLKLSCAASGFTFNKYAMNWVRQAPGKGLEWVARIRSKYNNYATYYADSVKDRFTISR |
| | | | | DDSKNTAYLQMNNLKTEDTAVYYCVRHGNFGNSYISYWAYWGQGTLVTVSSGGGGSGGGGSGGGG |
| | | | | SELVVTQEPSLTVSPGGTVTLTCGSSTGAVTSGYYPNWVQQKPGQAPRGLIGGTKFLAPGTPARF |
| | | | | SGSLLGGKAALTLSGVQPEDEAEYYCALWYSNRWVFGGGTKLTVL |
| 222. | MCSP-D2 | artificial | nt | CAGGTGCAGCTGGTCCAGTCTGGGGCTGAGGTGAAGAAGCCTGGGGCCTCAGTGAAGGTCTCCTG |
| | VH-VL-P x | | | CAAGGCTTCTGGATACACCTTCACCGGCTACTATATGCACTGGGTGCGACAGGCCCCTGGACAAG |
| | H2C VH-VL-P | | | GGCTTGAGTGGATGGGATGGATCAACCCTAACAGTGGTGGCACAAGCTACGCACAGAAGTTCCAG |
| | | | | GGCAGAGTCACCATGACTAGGGACACGTCCACGAGCACAGTCTACATGGAGCTGAGCAACCTGAG |
| | | | | ATCTGACGACACGGCCGTGTATTACTGTGCGAAATCCTGGGTCTCCTGGTTTGCTTCCTGGGGTC |
| | | | | AAGGAACCTTGGTCACCGTCTCCTCAGGTGGTGGTGGTTCTGGCGGCGGCGGCTCCGGTGGTGGT |
| | | | | GGTTCTGAGCTCGTGATGACCCAGTCTCCAGACTCCCTGGCTGTGTCTCTGGGCGAGAGGGCCAC |
| | | | | CATCAACTGCAAGTCCAGCCAGAGTGTTTTAAACAGCTCCAACAATAGGAACTACTTAGCTTGGT |
| | | | | ACCAGCAGAAACCAGGACAGCCTCCTAAGCTGCTCATTTACTGGGCATCTACCCGGGAATCCGGG |
| | | | | GTCCCTGACCGATTCAGTGGCAGCGGGTCTGGGACAGATTTCACTCTCACCATCAGTGGCCTGCA |
| | | | | GGCTGAAGATGTGGCAGTTTATTACTGTCAGCAACATTATAGTACTCCATTCACTTTTGGCCCTG |
| | | | | GGACCAAAGTGGATATCAAATCCGGAGGTGGTGGATCCGAGGTGCAGCTGCTCGAGTCTGGAGGA |
| | | | | GGATTGGTGCAGCCTGGAGGGTCATTGAAACTCTCATGTGCAGCCTCTGGATTCACCTTCAATAA |
| | | | | GTACGCCATGAACTGGGTCCGCCAGGCTCCAGGAAAGGGTTTGGAATGGGTTGCTCGCATAAGAA |
| | | | | GTAAATATAATAATTATGCAACATATTATGCCGATTCAGTGAAAGACAGGTTCACCATCTCCAGA |
| | | | | GATGATTCAAAAAACACTGCCTATCTACAAATGAACAACTTGAAAACTGAGGACACTGCCGTGTA |
| | | | | CTACTGTGTGAGACATGGGAACTTCGGTAATAGCTACATATCCTACTGGGCTTACTGGGGCCAAG |
| | | | | GGACTCTGGTCACCGTCTCCTCAGGTGGTGGTGGTTCTGGCGGCGGCGGCTCCGGTGGTGGTGGT |
| | | | | TCTGAGCTCGTTGTGACTCAGGAACCTTCACTCACCGTATCACCTGGTGGAACAGTCACACTCAC |
| | | | | TTGTGGCTCCTCGACTGGGGCTGTTACATCTGGCTACTACCCAAACTGGGTCCAACAAAAACCAG |
| | | | | GTCAGGCACCCCGTGGTCTAATAGGTGGGACTAAGTTCCTCGCCCCCGGTACTCCTGCCAGATTC |
| | | | | TCAGGCTCCCTGCTTGGAGGCAAGGCTGCCCTCACCCTCTCAGGGGTACAGCCAGAGGATGAGGC |
| | | | | AGAATATTACTGTGCTCTATGGTACAGCAACCGCTGGGTGTTCGGTGGAGGAACCAAACTGACTG |
| | | | | TCCTA |
| 223. | MCSP-F9 | artificial | aa | QVQLQESGPGLVKPSETLSLTCVVSGGSISSSNWWSWVRQPPGKGLEWLGTIYYNGNTYYNPSLK |
| | VH-VL x | | | SRVTISVDTSKNQFSLRLSSVTAADTAVYYCAKSWVSWFASWGQGTLVTVSSGGGGSGGGGSGGG |
| | H2C VH-VL | | | GSDIVMTQSPDSLAVSLGERATINCKSSQSVLSSSNNKNYLNWYQQKPGQPPKLLIYWASTRESG |
| | | | | VPDRFSGSGSGTDFTLTISSLQAEDVAVYYCQQHYSVPFTFGPGTKVDIKGGGGSEVQLVESGGG |
| | | | | LVQPGGSLKLSCAASGFTFNKYAMNWVRQAPGKGLEWVARIRSKYNNYATYYADSVKDRFTISRD |
| | | | | DSKNTAYLQMNNLKTEDTAVYYCVRHGNFGNSYISYWAYWGQGTLVTVSSGGGGSGGGGSGGGGS |
| | | | | QTVVTQEPSLTVSPGGTVTLTCGSSTGAVTSGYYPNWVQQKPGQAPRGLIGGTKFLAPGTPARFS |
| | | | | GSLLGGKAALTLSGVQPEDEAEYYCALWYSNRWVFGGGTKLTVL |
| 224. | MCSP-F9 | artificial | nt | CAGGTGCAGCTGCAAGAGTCTGGCCCAGGACTGGTGAAGCCTTCGGAGACCCTGTCCCTCACCTG |
| | VH-VL x | | | CGTTGTCTCTGGTGGCTCCATCAGCAGTAGTAACTGGTGGAGCTGGGTCCGCCAGCCCCCAGGGA |
| | H2C VH-VL | | | AGGGACTGGAGTGGCTTGGGACTATCTATTATAATGGGAATACCTACTACAACCCGTCCCTCAAG |
| | | | | AGTCGAGTCACCATCTCCGTAGACACGTCCAAGAACCAGTTCTCCCTGAGGCTGAGCTCTGTGAC |
| | | | | CGCCGCAGACACGGCCGTGTATTACTGTGCGAAATCCTGGGTCTCCTGGTTTGCTTCCTGGGGTC |
| | | | | AAGGAACCTTGGTCACCGTCTCCTCAGGTGGTGGTGGTTCTGGCGGCGGCGGCTCCGGTGGTGGT |
| | | | | GGTTCTGATATCGTGATGACACAGTCTCCAGACTCCCTGGCTGTGTCTCTGGGCGAGAGGGCCAC |
| | | | | CATCAACTGCAAGTCCAGCCAGAGTGTCTTATCCAGCTCCAACAATAAGAACTACTTAAATTGGT |
| | | | | ACCAGCAGAAACCAGGACAGCCTCCTAAGTTGCTCATTTACTGGGCATCTACCCGGGAATCCGGG |
| | | | | GTCCCTGACCGATTCAGTGGCAGCGGGTCTGGGACAGATTTCACTCTCACCATCAGCAGCCTGCA |
| | | | | GGCTGAAGATGTGGCAGTTTATTACTGTCAGCAACATTATAGTGTTCCATTCACTTTCGGCCCTG |
| | | | | GGACCAAAGTGGATATCAAAGGAGGTGGTGGCTCCGAGGTGCAGCTGGTCGAGTCTGGAGGAGGA |
| | | | | TTGGTGCAGCCTGGAGGGTCATTGAAACTCTCATGTGCAGCCTCTGGATTCACCTTCAATAAGTA |
| | | | | CGCCATGAACTGGGTCCGCCAGGCTCCAGGAAAGGGTTTGGAATGGGTTGCTCGCATAAGAAGTA |
| | | | | AATATAATAATTATGCAACATATTATGCCGATTCAGTGAAAGACAGGTTCACCATCTCCAGAGAT |
| | | | | GATTCAAAAAACACTGCCTATCTACAAATGAACAACTTGAAAACTGAGGACACTGCCGTGTACTA |
| | | | | CTGTGTGAGACATGGGAACTTCGGTAATAGCTACATATCCTACTGGGCTTACTGGGGCCAAGGGA |
| | | | | CTCTGGTCACCGTCTCCTCAGGTGGTGGTGGTTCTGGCGGCGGCGGCTCCGGTGGTGGTGGTTCT |
| | | | | CAGACTGTTGTGACTCAGGAACCTTCACTCACCGTATCACCTGGTGGAACAGTCACACTCACTTG |
| | | | | TGGCTCCTCGACTGGGGCTGTTACATCTGGCTACTACCCAAACTGGGTCCAACAAAAACCAGGTC |
| | | | | AGGCACCCCGTGGTCTAATAGGTGGGACTAAGTTCCTCGCCCCCGGTACTCCTGCCAGATTCTCA |
| | | | | GGCTCCCTGCTTGGAGGCAAGGCTGCCCTCACCCTCTCAGGGGTACAGCCAGAGGATGAGGCAGA |
| | | | | ATATTACTGTGCTCTATGGTACAGCAACCGCTGGGTGTTCGGTGGAGGAACCAAACTGACTGTCC |
| | | | | TA |
| 225. | MCSP-F9 | artificial | aa | EVQLQESGPGLVKPSETLSLTCVVSGGSISSSNWWSWVRQPPGKGLEWLGTIYYNGNTYYNPSLK |
| | VH-VL-P x | | | SRVTISVDTSKNQFSLRLSSVTAADTAVYYCAKSWVSWFASWGQGTLVTVSSGGGGSGGGGSGGG |
| | H2C VH-VL-P | | | GSELVMTQSPDSLAVSLGERATINCKSSQSVLSSSNNKNYLNWYQQKPGQPPKLLIYWASTRESG |
| | | | | VPDRFSGSGSGTDFTLTISSLQAEDVAVYYCQQHYSVPFTFGPGTKVDIKSGGGGSEVQLLESGG |
| | | | | GLVQPGGSLKLSCAASGFTFNKYAMNWVRQAPGKGLEWVARIRSKYNNYATYYADSVKDRFTISR |
| | | | | DDSKNTAYLQMNNLKTEDTAVYYCVRHGNFGNSYISYWAYWGQGTLVTVSSGGGGSGGGGSGGGG |
| | | | | SELVVTQEPSLTVSPGGTVTLTCGSSTGAVTSGYYPNWVQQKPGQAPRGLIGGTKFLAPGTPARF |
| | | | | SGSLLGGKAALTLSGVQPEDEAEYYCALWYSNRWVFGGGTKLTVL |
| 226. | MCSP-F9 | artificial | nt | GAGGTGCAGCTGCAAGAGTCTGGCCCAGGACTGGTGAAGCCTTCGGAGACCCTGTCCCTCACCTG |
| | VH-VL-P x | | | CGTTGTCTCTGGTGGCTCCATCAGCAGTAGTAACTGGTGGAGCTGGGTCCGCCAGCCCCCAGGGA |
| | H2C VH-VL-P | | | AGGGACTGGAGTGGCTTGGGACTATCTATTATAATGGGAATACCTACTACAACCCGTCCCTCAAG |
| | | | | AGTCGAGTCACCATCTCCGTAGACACGTCCAAGAACCAGTTCTCCCTGAGGCTGAGCTCTGTGAC |
| | | | | CGCCGCAGACACGGCCGTGTATTACTGTGCGAAATCCTGGGTCTCCTGGTTTGCTTCCTGGGGTC |
| | | | | AAGGAACCTTGGTCACCGTCTCCTCAGGTGGTGGTGGTTCTGGCGGCGGCGGCTCCGGTGGTGGT |
| | | | | GGTTCTGAGCTCGTGATGACACAGTCTCCAGACTCCCTGGCTGTGTCTCTGGGCGAGAGGGCCAC |
| | | | | CATCAACTGCAAGTCCAGCCAGAGTGTCTTATCCAGCTCCAACAATAAGAACTACTTAAATTGGT |
| | | | | ACCAGCAGAAACCAGGACAGCCTCCTAAGTTGCTCATTTACTGGGCATCTACCCGGGAATCCGGG |
| | | | | GTCCCTGACCGATTCAGTGGCAGCGGGTCTGGGACAGATTTCACTCTCACCATCAGCAGCCTGCA |
| | | | | GGCTGAAGATGTGGCAGTTTATTACTGTCAGCAACATTATAGTGTTCCATTCACTTTCGGCCCTG |
| | | | | GGACCAAAGTGGATATCAAATCCGGAGGTGGTGGATCCGAGGTGCAGCTGCTCGAGTCTGGAGGA |
| | | | | GGATTGGTGCAGCCTGGAGGGTCATTGAAACTCTCATGTGCAGCCTCTGGATTCACCTTCAATAA |
| | | | | GTACGCCATGAACTGGGTCCGCCAGGCTCCAGGAAAGGGTTTGGAATGGGTTGCTCGCATAAGAA |
| | | | | GTAAATATAATAATTATGCAACATATTATGCCGATTCAGTGAAAGACAGGTTCACCATCTCCAGA |
| | | | | GATGATTCAAAAAACACTGCCTATCTACAAATGAACAACTTGAAAACTGAGGACACTGCCGTGTA |
| | | | | CTACTGTGTGAGACATGGGAACTTCGGTAATAGCTACATATCCTACTGGGCTTACTGGGGCCAAG |
| | | | | GGACTCTGGTCACCGTCTCCTCAGGTGGTGGTGGTTCTGGCGGCGGCGGCTCCGGTGGTGGTGGT |
| | | | | TCTGAGCTCGTTGTGACTCAGGAACCTTCACTCACCGTATCACCTGGTGGAACAGTCACACTCAC |
| | | | | TTGTGGCTCCTCGACTGGGGCTGTTACATCTGGCTACTACCCAAACTGGGTCCAACAAAAACCAG |
| | | | | GTCAGGCACCCCGTGGTCTAATAGGTGGGACTAAGTTCCTCGCCCCCGGTACTCCTGCCAGATTC |
| | | | | TCAGGCTCCCTGCTTGGAGGCAAGGCTGCCCTCACCCTCTCAGGGGTACAGCCAGAGGATGAGGC |
| | | | | AGAATATTACTGTGCTCTATGGTACAGCAACCGCTGGGTGTTCGGTGGAGGAACCAAACTGACTG |
| | | | | TCCTA |
| 227. | MCSP-F9 | artificial | aa | EVQLQESGPGLVKPSETLSLTCVVSGGSISSSNWWSWVRQPPGKGLEWLGTIYYNGNTYYNPSLK |
| | VH-VL-P x | | | SRVTISVDTSKNQFSLRLSSVTAADTAVYYCAKSWVSWFASWGQGTLVTVSSGGGGSGGGGSGGG |
| | G4H VH-VL-P | | | GSELVMTQSPDSLAVSLGERATINCKSSQSVLSSSNNKNYLNWYQQKPGQPPKLLIYWASTRESG |
| | | | | VPDRFSGSGSGTDFTLTISSLQAEDVAVYYCQQHYSVPFTFGPGTKVDIKSGGGGSEVQLLESGG |
| | | | | GLVQPGGSLKLSCAASGFTFNRYAMNWVRQAPGKGLEWVARIRSKYNNYATYYADSVKGRFTISR |
| | | | | DDSKNTAYLQMNNLKTEDTAVYYCVRHGNFGNSYLSYFAYWGQGTLVTVSSGGGGSGGGGSGGGG |
| | | | | SELVVTQEPSLTVSPGGTVTLTCGSSTGAVTSGYYPNWVQQKPGQAPRGLIGGTKFLAPGTPARF |
| | | | | SGSLLGGKAALTLSGVQPEDEAEYYCALWYSNRWVFGGGTKLTVL |
| 228. | MCSP-F9 | artificial | nt | GAGGTGCAGCTGCAAGAGTCTGGCCCAGGACTGGTGAAGCCTTCGGAGACCCTGTCCCTCACCTG |
| | VH-VL-P x | | | CGTTGTCTCTGGTGGCTCCATCAGCAGTAGTAACTGGTGGAGCTGGGTCCGCCAGCCCCCAGGGA |
| | G4H VH-VL-P | | | AGGGACTGGAGTGGCTTGGGACTATCTATTATAATGGGAATACCTACTACAACCCGTCCCTCAAG |
| | | | | AGTCGAGTCACCATCTCCGTAGACACGTCCAAGAACCAGTTCTCCCTGAGGCTGAGCTCTGTGAC |
| | | | | CGCCGCAGACACGGCCGTGTATTACTGTGCGAAATCCTGGGTCTCCTGGTTTGCTTCCTGGGGTC |
| | | | | AAGGAACCTTGGTCACCGTCTCCTCAGGTGGTGGTGGTTCTGGCGGCGGCGGCTCCGGTGGTGGT |
| | | | | GGTTCTGAGCTCGTGATGACACAGTCTCCAGACTCCCTGGCTGTGTCTCTGGGCGAGAGGGCCAC |
| | | | | CATCAACTGCAAGTCCAGCCAGAGTGTCTTATCCAGCTCCAACAATAAGAACTACTTAAATTGGT |
| | | | | ACCAGCAGAAACCAGGACAGCCTCCTAAGTTGCTCATTTACTGGGCATCTACCCGGGAATCCGGG |
| | | | | GTCCCTGACCGATTCAGTGGCAGCGGGTCTGGGACAGATTTCACTCTCACCATCAGCAGCCTGCA |
| | | | | GGCTGAAGATGTGGCAGTTTATTACTGTCAGCAACATTATAGTGTTCCATTCACTTTCGGCCCTG |
| | | | | GGACCAAAGTGGATATCAAATCCGGAGGTGGTGGATCCGAGGTGCAGCTGCTCGAGTCTGGAGGA |
| | | | | GGATTGGTGCAGCCTGGAGGGTCATTGAAACTCTCATGTGCAGCCTCTGGATTCACCTTCAATCG |
| | | | | CTACGCCATGAACTGGGTCCGCCAGGCTCCAGGAAAGGGTTTGGAATGGGTTGCTCGCATAAGAA |
| | | | | GTAAATATAATAATTATGCAACATATTATGCCGATTCAGTGAAAGGGAGGTTCACCATCTCCAGA |
| | | | | GATGATTCAAAAAACACTGCCTATCTACAAATGAACAACTTGAAAACTGAGGACACTGCCGTGTA |
| | | | | CTACTGTGTGAGACATGGGAACTTCGGTAATAGCTACTTATCCTACTTCGCTTACTGGGGCCAAG |
| | | | | GGACTCTGGTCACCGTCTCCTCAGGTGGTGGTGGTTCTGGCGGCGGCGGCTCCGGTGGTGGTGGT |
| | | | | TCTGAGCTCGTTGTGACTCAGGAACCTTCACTCACCGTATCACCTGGTGGAACAGTCACACTCAC |
| | | | | TTGTGGCTCCTCGACTGGGGCTGTTACATCTGGCTACTACCCAAACTGGGTCCAACAAAAACCAG |
| | | | | GTCAGGCACCCCGTGGTCTAATAGGTGGGACTAAGTTCCTCGCCCCCGGTACTCCTGCCAGATTC |
| | | | | TCAGGCTCCCTGCTTGGAGGCAAGGCTGCCCTCACCCTCTCAGGGGTACAGCCAGAGGATGAGGC |
| | | | | AGAATATTACTGTGCTCTATGGTACAGCAACCGCTGGGTGTTCGGTGGAGGAACCAAACTGACTG |
| | | | | TCCTA |
| 229. | 1-27 CD3ε-Fc | artificial | aa | QDGNEEMGGITQTPYKVSISGTTVILTSGEPKSCDKTHTCPPCPAPELLGGPSVFLFPPKPKDTL |
| | | | | MISRTPEVTCVVVDVSHEDPEVKFNWYVDGVEVHNAKTKPREEQYNSTYRVVSVLTVLHQDWLNG |
| | | | | KEYKCKVSNKALPAPIEKTISKAKGQPREPQVYTLPPSREEMTKNQVSLTCLVKGFYPSDIAVEW |
| | | | | ESNGQPENNYKTTPPVLDSDGSFFLYSKLTVDKSRWQQGNVFSCSVMHEALHNHYTQKSLSLSPG |
| | | | | KHHHHHH |
| 230. | 1-27 CD3ε-Fc | artificial | nt | ATGGGATGGAGCTGTATCATCCTCTTCTTGGTAGCAACAGCTACAGGTGTACACTCCCAAGATGG |
| | | | | TAATGAAGAAATGGGTGGTATTACACAGACACCATATAAAGTCTCCATCTCTGGAACCACAGTAA |
| | | | | TATTGACATCCGGAGAGCCCAAATCTTGTGACAAAACTCACACATGCCCACCGTGCCCAGCACCT |
| | | | | GAACTCCTGGGGGGACCGTCAGTCTTCCTCTTCCCCCCAAAACCCAAGGACACCCTCATGATCTC |
| | | | | CCGGACCCCTGAGGTCACATGCGTGGTGGTGGACGTGAGCCACGAAGACCCTGAGGTCAAGTTCA |
| | | | | ACTGGTACGTGGACGGCGTGGAGGTGCATAATGCCAAGACAAAGCCGCGGGAGGAGCAGTACAAC |
| | | | | AGCACGTACCGTGTGGTCAGCGTCCTCACCGTCCTGCACCAGGACTGGCTGAATGGCAAGGAGTA |
| | | | | CAAGTGCAAGGTCTCCAACAAAGCCCTCCCAGCCCCCATCGAGAAAACCATCTCCAAAGCCAAAG |
| | | | | GGCAGCCCCGAGAACCACAGGTGTACACCCTGCCCCCATCCCGGGAGGAGATGACCAAGAACCAG |
| | | | | GTCAGCCTGACCTGCCTGGTCAAAGGCTTCTATCCCAGCGACATCGCCGTGGAGTGGGAGAGCAA |
| | | | | TGGGCAGCCGGAGAACAACTACAAGACCACGCCTCCCGTGCTGGACTCCGACGGCTCCTTCTTCC |
| | | | | TCTATAGCAAGCTCACCGTGGACAAGAGCAGGTGGCAGCAGGGGAACGTCTTCTCATGCTCCGTG |
| | | | | ATGCATGAGGCTCTGCACAACCACTACACGCAGAAGAGCCTCTCCCTGTCCCCGGGTAAACATCA |
| | | | | TCACCATCATCAT |
| 231. | human 1-27 | artificial | aa | QDGNEEMGGITQTPYKVSISGTTVILTDYKDDDDKTASFAAAQKECVCENYKLAVNCFLNDNGQC |
| | CD3ε - EpCAM | | | QCTSIGAQNTVLCSKLAAKCLVMKAEMNGSKLGRRAKPEGALQNNDGLYDPDCDESGLFKAKQCN |
| | | | | GTSTCWCVNTAGVRRTDKDTEITCSERVRTYWIIIELKHKAREKPYDVQSLRTALEEAIKTRYQL |
| | | | | DPKFITNILYEDNVITIDLVQNSSQKTQNDVDIADVAYYFEKDVKGESLFHSKKMDLRVNGEQLD |
| | | | | LDPGQTLIYYVDEKAPEFSMQGLKAGVIAVIVVVVIAIVAGIVVLVISRKKRMAKYEKAEIKEMG |
| | | | | EMHRELNA |
| 232. | human 1-27 | artificial | nt | ATGGGATGGAGCTGTATCATCCTCTTCTTGGTAGCAACAGCTACAGGTGTACACTCCCAAGATGG |
| | CD3ε - EpCAM | | | TAATGAAGAAATGGGTGGTATTACACAGACACCATATAAAGTCTCCATCTCTGGAACCACAGTAA |
| | | | | TATTGACAGATTACAAGGACGACGATGACAAGACTGCGAGTTTTGCCGCAGCTCAGAAAGAATGT |
| | | | | GTCTGTGAAAACTACAAGCTGGCCGTAAACTGCTTTTTGAATGACAATGGTCAATGCCAGTGTAC |
| | | | | TTCGATTGGTGCACAAAATACTGTCCTTTGCTCAAAGCTGGCTGCCAAATGTTTGGTGATGAAGG |
| | | | | CAGAAATGAACGGCTCAAAACTTGGGAGAAGAGCGAAACCTGAAGGGGCTCTCCAGAACAATGAT |
| | | | | GGCCTTTACGATCCTGACTGCGATGAGAGCGGGCTCTTTAAGGCCAAGCAGTGCAACGGCACCTC |
| | | | | CACGTGCTGGTGTGTGAACACTGCTGGGGTCAGAAGAACTGACAAGGACACTGAAATAACCTGCT |
| | | | | CTGAGCGAGTGAGAACCTACTGGATCATCATTGAATTAAAACACAAAGCAAGAGAAAAACCTTAT |
| | | | | GATGTTCAAAGTTTGCGGACTGCACTTGAGGAGGCGATCAAAACGCGTTATCAACTGGATCCAAA |
| | | | | ATTTATCACAAATATTTTGTATGAGGATAATGTTATCACTATTGATCTGGTTCAAAATTCTTCTC |
| | | | | AGAAAACTCAGAATGATGTGGACATAGCTGATGTGGCTTATTATTTTGAAAAAGATGTTAAAGGT |
| | | | | GAATCCTTGTTTCATTCTAAGAAAATGGACCTGAGAGTAAATGGGGAACAACTGGATCTGGATCC |
| | | | | TGGTCAAACTTTAATTTATTATGTCGATGAAAAAGCACCTGAATTCTCAATGCAGGGTCTAAAAG |
| | | | | CTGGTGTTATTGCTGTTATTGTGGTTGTGGTGATAGCAATTGTTGCTGGAATTGTTGTGCTGGTT |
| | | | | ATTTCCAGAAAGAAGAGAATGGCAAAGTATGAGAAGGCTGAGATAAAGGAGATGGGTGAGATGCA |
| | | | | TAGGGAACTCAATGCA |
| 233. | marmoset 1-27 | artificial | aa | QDGNEEMGDTTQNPYKVSISGTTVTLTDYKDDDDKTASFAAAQKECVCENYKLAVNCFLNDNGQC |
| | CD3ε -EpCAM | | | QCTSIGAQNTVLCSKLAAKCLVMKAEMNGSKLGRRAKPEGALQNNDGLYDPDCDESGLFKAKQCN |
| | | | | GTSTCWCVNTAGVRRTDKDTEITCSERVRTYWIIIELKHKAREKPYDVQSLRTALEEAIKTRYQL |
| | | | | DPKFITNILYEDNVITIDLVQNSSQKTQNDVDIADVAYYFEKDVKGESLFHSKKMDLRVNGEQLD |
| | | | | LDPGQTLIYYVDEKAPEFSMQGLKAGVIAVIVVVVIAIVAGIVVLVISRKKRMAKYEKAEIKEMG |
| | | | | EMHRELNA |
| 234. | marmoset 1-27 | artificial | nt | ATGGGATGGAGCTGTATCATCCTCTTCTTGGTAGCAACAGCTACAGGTGTACACTCCCAGGACGG |
| | CD3ε -EpCAM | | | TAATGAAGAAATGGGTGATACTACACAGAACCCATATAAAGTTTCCATCTCAGGAACCACAGTAA |
| | | | | CACTGACAGATTACAAGGACGACGATGACAAGACTGCGAGTTTTGCCGCAGCTCAGAAAGAATGT |
| | | | | GTCTGTGAAAACTACAAGCTGGCCGTAAACTGCTTTTTGAATGACAATGGTCAATGCCAGTGTAC |
| | | | | TTCGATTGGTGCACAAAATACTGTCCTTTGCTCAAAGCTGGCTGCCAAATGTTTGGTGATGAAGG |
| | | | | CAGAAATGAACGGCTCAAAACTTGGGAGAAGAGCGAAACCTGAAGGGGCTCTCCAGAACAATGAT |
| | | | | GGCCTTTACGATCCTGACTGCGATGAGAGCGGGCTCTTTAAGGCCAAGCAGTGCAACGGCACCTC |
| | | | | CACGTGCTGGTGTGTGAACACTGCTGGGGTCAGAAGAACTGACAAGGACACTGAAATAACCTGCT |
| | | | | CTGAGCGAGTGAGAACCTACTGGATCATCATTGAATTAAAACACAAAGCAAGAGAAAAACCTTAT |
| | | | | GATGTTCAAAGTTTGCGGACTGCACTTGAGGAGGCGATCAAAACGCGTTATCAACTGGATCCAAA |
| | | | | ATTTATCACAAATATTTTGTATGAGGATAATGTTATCACTATTGATCTGGTTCAAAATTCTTCTC |
| | | | | AGAAAACTCAGAATGATGTGGACATAGCTGATGTGGCTTATTATTTTGAAAAAGATGTTAAAGGT |
| | | | | GAATCCTTGTTTCATTCTAAGAAAATGGACCTGAGAGTAAATGGGGAACAACTGGATCTGGATCC |
| | | | | TGGTCAAACTTTAATTTATTATGTCGATGAAAAAGCACCTGAATTCTCAATGCAGGGTCTAAAAG |
| | | | | CTGGTGTTATTGCTGTTATTGTGGTTGTGGTGATAGCAATTGTTGCTGGAATTGTTGTGCTGGTT |
| | | | | ATTTCCAGAAAGAAGAGAATGGCAAAGTATGAGAAGGCTGAGATAAAGGAGATGGGTGAGATGCA |
| | | | | TAGGGAACTCAATGCA |
| 235. | tamarin 1-27 | artificial | aa | QDGNEEMGDTTQNPYKVSISGTTVTLTDYKDDDDKTASFAAAQKECVCENYKLAVNCFLNDNGQC |
| | CD3ε - EpCAM | | | QCTSIGAQNTVLCSKLAAKCLVMKAEMNGSKLGRRAKPEGALQNNDGLYDPDCDESGLFKAKQCN |
| | | | | GTSTCWCVNTAGVRRTDKDTEITCSERVRTYWIIIELKHKAREKPYDVQSLRTALEEAIKTRYQL |
| | | | | DPKFITNILYEDNVITIDLVQNSSQKTQNDVDIADVAYYFEKDVKGESLFHSKKMDLRVNGEQLD |
| | | | | LDPGQTLIYYVDEKAPEFSMQGLKAGVIAVIVVVVIAIVAGIVVLVISRKKRMAKYEKAEIKEMG |
| | | | | EMHRELNA |
| 236. | tamarin 1-27 | artificial | nt | ATGGGATGGAGCTGTATCATCCTCTTCTTGGTAGCAACAGCTACAGGTGTACACTCCCAGGACGG |
| | CD3ε - EpCAM | | | TAATGAAGAAATGGGTGATACTACACAGAACCCATATAAAGTTTCCATCTCAGGAACCACAGTAA |
| | | | | CACTGACAGATTACAAGGACGACGATGACAAGACTGCGAGTTTTGCCGCAGCTCAGAAAGAATGT |
| | | | | GTCTGTGAAAACTACAAGCTGGCCGTAAACTGCTTTTTGAATGACAATGGTCAATGCCAGTGTAC |
| | | | | TTCGATTGGTGCACAAAATACTGTCCTTTGCTCAAAGCTGGCTGCCAAATGTTTGGTGATGAAGG |
| | | | | CAGAAATGAACGGCTCAAAACTTGGGAGAAGAGCGAAACCTGAAGGGGCTCTCCAGAACAATGAT |
| | | | | GGCCTTTACGATCCTGACTGCGATGAGAGCGGGCTCTTTAAGGCCAAGCAGTGCAACGGCACCTC |
| | | | | CACGTGCTGGTGTGTGAACACTGCTGGGGTCAGAAGAACTGACAAGGACACTGAAATAACCTGCT |
| | | | | CTGAGCGAGTGAGAACCTACTGGATCATCATTGAATTAAAACACAAAGCAAGAGAAAAACCTTAT |
| | | | | GATGTTCAAAGTTTGCGGACTGCACTTGAGGAGGCGATCAAAACGCGTTATCAACTGGATCCAAA |
| | | | | ATTTATCACAAATATTTTGTATGAGGATAATGTTATCACTATTGATCTGGTTCAAAATTCTTCTC |
| | | | | AGAAAACTCAGAATGATGTGGACATAGCTGATGTGGCTTATTATTTTGAAAAAGATGTTAAAGGT |
| | | | | GAATCCTTGTTTCATTCTAAGAAAATGGACCTGAGAGTAAATGGGGAACAACTGGATCTGGATCC |
| | | | | TGGTCAAACTTTAATTTATTATGTCGATGAAAAAGCACCTGAATTCTCAATGCAGGGTCTAAAAG |
| | | | | CTGGTGTTATTGCTGTTATTGTGGTTGTGGTGATAGCAATTGTTGCTGGAATTGTTGTGCTGGTT |
| | | | | ATTTCCAGAAAGAAGAGAATGGCAAAGTATGAGAAGGCTGAGATAAAGGAGATGGGTGAGATGCA |
| | | | | TAGGGAACTCAATGCA |
| 237. | squirrel | artificial | aa | QDGNEEIGDTTQNPYKVSISGTTVTLTDYKDDDDKTASFAAAQKECVCENYKLAVNCFLNDNGQC |
| | monkey 1-27 | | | QCTSIGAQNTVLCSKLAAKCLVMKAEMNGSKLGRRAKPEGALQNNDGLYDPDCDESGLFKAKQCN |
| | CD3ε -EpCAM | | | GTSTCWCVNTAGVRRTDKDTEITCSERVRTYWIIIELKHKAREKPYDVQSLRTALEEAIKTRYQL |
| | | | | DPKFITNILYEDNVITIDLVQNSSQKTQNDVDIADVAYYFEKDVKGESLFHSKKMDLRVNGEQLD |
| | | | | LDPGQTLIYYVDEKAPEFSMQGLKAGVIAVIVVVVIAIVAGIVVLVISRKKRMAKYEKAEIKEMG |
| | | | | EMHRELNA |
| 238. | squirrel | artificial | nt | ATGGGATGGAGCTGTATCATCCTCTTCTTGGTAGCAACAGCTACAGGTGTACACTCCCAGGACGG |
| | monkey 1-27 | | | TAATGAAGAGATTGGTGATACTACCCAGAACCCATATAAAGTTTCCATCTCAGGAACCACAGTAA |
| | CD3ε -EpCAM | | | CACTGACAGATTACAAGGACGACGATGACAAGACTGCGAGTTTTGCCGCAGCTCAGAAAGAATGT |
| | | | | GTCTGTGAAAACTACAAGCTGGCCGTAAACTGCTTTTTGAATGACAATGGTCAATGCCAGTGTAC |
| | | | | TTCGATTGGTGCACAAAATACTGTCCTTTGCTCAAAGCTGGCTGCCAAATGTTTGGTGATGAAGG |
| | | | | CAGAAATGAACGGCTCAAAACTTGGGAGAAGAGCGAAACCTGAAGGGGCTCTCCAGAACAATGAT |
| | | | | GGCCTTTACGATCCTGACTGCGATGAGAGCGGGCTCTTTAAGGCCAAGCAGTGCAACGGCACCTC |
| | | | | CACGTGCTGGTGTGTGAACACTGCTGGGGTCAGAAGAACTGACAAGGACACTGAAATAACCTGCT |
| | | | | CTGAGCGAGTGAGAACCTACTGGATCATCATTGAATTAAAACACAAAGCAAGAGAAAAACCTTAT |
| | | | | GATGTTCAAAGTTTGCGGACTGCACTTGAGGAGGCGATCAAAACGCGTTATCAACTGGATCCAAA |
| | | | | ATTTATCACAAATATTTTGTATGAGGATAATGTTATCACTATTGATCTGGTTCAAAATTCTTCTC |
| | | | | AGAAAACTCAGAATGATGTGGACATAGCTGATGTGGCTTATTATTTTGAAAAAGATGTTAAAGGT |
| | | | | GAATCCTTGTTTCATTCTAAGAAAATGGACCTGAGAGTAAATGGGGAACAACTGGATCTGGATCC |
| | | | | TGGTCAAACTTTAATTTATTATGTCGATGAAAAAGCACCTGAATTCTCAATGCAGGGTCTAAAAG |
| | | | | CTGGTGTTATTGCTGTTATTGTGGTTGTGGTGATAGCAATTGTTGCTGGAATTGTTGTGCTGGTT |
| | | | | ATTTCCAGAAAGAAGAGAATGGCAAAGTATGAGAAGGCTGAGATAAAGGAGATGGGTGAGATGCA |
| | | | | TAGGGAACTCAATGCA |
| 239. | swine 1-27 | artificial | aa | QEDIERPDEDTQKTFKVSISGDKVELTDYKDDDDKTASFAAAQKECVCENYKLAVNCFLNDNGQC |
| | CD3ε - EpCAM | | | QCTSIGAQNTVLCSKLAAKCLVMKAEMNGSKLGRRAKPEGALQNNDGLYDPDCDESGLFKAKQCN |
| | | | | GTSTCWCVNTAGVRRTDKDTEITCSERVRTYWIIIELKHKAREKPYDVQSLRTALEEAIKTRYQL |
| | | | | DPKFITNILYEDNVITIDLVQNSSQKTQNDVDIADVAYYFEKDVKGESLFHSKKMDLRVNGEQLD |
| | | | | LDPGQTLIYYVDEKAPEFSMQGLKAGVIAVIVVVVIAIVAGIVVLVISRKKRMAKYEKAEIKEMG |
| | | | | EMHRELNA |
| 240. | swine 1-27 | artificial | nt | ATGGGATGGAGCTGTATCATCCTCTTCTTGGTAGCAACAGCTACAGGTGTACACTCCCAAGAAGA |
| | CD3ε - EpCAM | | | CATTGAAAGACCAGATGAAGATACACAGAAAACATTTAAAGTCTCCATCTCTGGAGACAAAGTAG |
| | | | | AGCTGACAGATTACAAGGACGACGATGACAAGACTGCGAGTTTTGCCGCAGCTCAGAAAGAATGT |
| | | | | GTCTGTGAAAACTACAAGCTGGCCGTAAACTGCTTTTTGAATGACAATGGTCAATGCCAGTGTAC |
| | | | | TTCGATTGGTGCACAAAATACTGTCCTTTGCTCAAAGCTGGCTGCCAAATGTTTGGTGATCAAGG |
| | | | | CAGAAATGAACGGCTCAAAACTTGGGAGAAGAGCGAAACCTGAAGGGGCTCTCCAGAACAATGAT |
| | | | | GGCCTTTACGATCCTGACTGCGATGAGAGCGGGCTCTTTAAGGCCAAGCAGTGCAACGGCACCTC |
| | | | | CACGTGCTGGTGTGTGAACACTGCTGGGGTCAGAAGAACTGACAAGGACACTGAAATAACCTGCT |
| | | | | CTGAGCGAGTGAGAACCTACTGGATCATCATTGAATTAAAACACAAAGCAAGAGAAAAACCTTAT |
| | | | | GATGTTCAAAGTTTGCGGACTGCACTTGAGGAGGCGATCAAAACGCGTTATCAACTGGATCCAAA |
| | | | | ATTTATCACAAATATTTTGTATGAGGATAATGTTATCACTATTGATCTGGTTCAAAATTCTTCTC |
| | | | | AGAAAACTCAGAATGATGTGGACATAGCTGATGTGGCTTATTATTTTGAAAAAGATGTTAAAGGT |
| | | | | GAATCCTTGTTTCATTCTAAGAAAATGGACCTGAGAGTAAATGGGGAACAACTGGATCTGGATCC |
| | | | | TGGTCAAACTTTAATTTATTATGTCGATGAAAAAGCACCTGAATTCTCAATGCAGGGTCTAAAAG |
| | | | | CTGGTGTTATTGCTGTTATTGTGGTTGTGGTGATAGCAATTGTTGCTGGAATTGTTGTGCTGGTT |
| | | | | ATTTCCAGAAAGAAGAGAATGGCAAAGTATGAGAAGGCTGAGATAAAGGAGATGGGTGAGATGCA |
| | | | | TAGGGAACTCAATGCA |
| 241. | human CD3 | human | aa | QDGNEEMGGITQTPYKVSISGTTVILTCPQYPGSEILWQHNDKNIGGDEDDKNIGSDEDHLSLKE |
| | epsilon | | | FSELEQSGYYVCYPRGSKPEDANFYLYLRARVCENCMEMDVMSVATIVIVDICITGGLLLLVYYW |
| | chain | | | SKNRKAKAKPVTRGAGAGGRQRGQNKERPPPVPNPDYEPIRKGQRDLYSGLNQRRI |
| 242. | human CD3 | human | nt | ATGCAGTCGGGCACTCACTGGAGAGTTCTGGGCCTCTGCCTCTTATCAGTTGGCGTTTGGGGGCA |
| | epsilon | | | AGATGGTAATGAAGAAATGGGTGGTATTACACAGACACCATATAAAGTCTCCATCTCTGGAACCA |
| | chain | | | CAGTAATATTGACATGCCCTCAGTATCCTGGATCTGAAATACTATGGCAACACAATGATAAAAAC |
| | | | | ATAGGCGGTGATGAGGATGATAAAAACATAGGCAGTGATGAGGATCACCTGTCACTGAAGGAATT |
| | | | | TTCAGAATTGGAGCAAAGTGGTTATTATGTCTGCTACCCCAGAGGAAGCAAACCAGAAGATGCGA |
| | | | | ACTTTTATCTCTACCTGAGGGCACGCGTGTGTGAGAACTGCATGGAGATGGATGTGATGTCGGTG |
| | | | | GCCACAATTGTCATAGTGGACATCTGCATCACTGGGGGCTTGCTGCTGCTGGTTTACTACTGGAG |
| | | | | CAAGAATAGAAAGGCCAAGGCCAAGCCTGTGACACGAGGAGCGGGTGCTGGCGGCAGGCAAAGGG |
| | | | | GACAAAACAAGGAGAGGCCACCACCTGTTCCCAACCCAGACTATGAGCCCATCCGGAAAGGCCAG |
| | | | | CGGGACCTGTATTCTGGCCTGAATCAGAGACGCATC |
| 243. | 19 amino acid | artificial | aa | MGWSCIILFLVATATGVHS |
| | immunoglobulin | | | |
| | leader peptide | | | |
| 244. | 19 amino acid | artificial | nt | ATGGGATGGAGCTGTATCATCCTCTTCTTGGTAGCAACAGCTACAGGTGTACACTCC |
| | immunoglobulin | | | |
| | leader peptide | | | |
| 245. | murine IgG1 | murine | aa | AKTTPPSVYPLAPGSAAQTNSMVTLGCLVKGYFPEPVTVTWNSGSLSSGVHTFPAVLQSDLYTLS |
| | heavy | | | SSVTVPSSTWPSETVTCNVAHPASSTKVDKKIVPRDCGCKPCICTVPEVSSVFIFPPKPKDVLTI |
| | chain | | | TLTPKVTCVVVDISKDDPEVQFSWFVDDVEVHTAQTQPREEQFNSTFRSVSELPIMHQDWLNGKE |
| | constant | | | FKCRVNSAAFPAPIEKTISKTKGRPKAPQVYTIPPPKEQMAKDKVSLTCMITDFFPEDITVEWQW |
| | region | | | NGQPAENYKNTQPIMDTDGSYFVYSKLNVQKSNWEAGNTFTCSVLHEGLHNHHTEKSLSHSPGK |
| 246. | murine IgG1 | murine | nt | GCCAAAACGACACCCCCATCTGTCTATCCACTGGCCCCTGGATCTGCTGCCCAAACTAACTCCAT |
| | heavy | | | GGTGACCCTGGGATGCCTGGTCAAGGGCTATTTCCCTGAGCCAGTGACAGTGACCTGGAACTCTG |
| | chain | | | GATCCCTGTCCAGCGGTGTGCACACCTTCCCAGCTGTCCTGCAGTCTGACCTCTACACTCTGAGC |
| | constant | | | AGCTCAGTGACTGTCCCCTCCAGCACCTGGCCCAGCGAGACCGTCACCTGCAACGTTGCCCACCC |
| | region | | | GGCCAGCAGCACCAAGGTGGACAAGAAAATTGTGCCCAGGGATTGTGGTTGTAAGCCTTGCATAT |
| | | | | GTACAGTCCCAGAAGTATCATCTGTCTTCATCTTCCCCCCAAAGCCCAAGGATGTGCTCACCATT |
| | | | | ACTCTGACTCCTAAGGTCACGTGTGTTGTGGTAGACATCAGCAAGGATGATCCCGAGGTCCAGTT |
| | | | | CAGCTGGTTTGTAGATGATGTGGAGGTGCACACAGCTCAGACGCAACCCCGGGAGGAGCAGTTCA |
| | | | | ACAGCACTTTCCGCTCAGTCAGTGAACTTCCCATCATGCACCAGGACTGGCTCAATGGCAAGGAG |
| | | | | TTCAAATGCAGGGTCAACAGTGCAGCTTTCCCTGCCCCCATCGAGAAAACCATCTCCAAAACCAA |
| | | | | AGGCAGACCGAAGGCTCCACAGGTGTACACCATTCCACCTCCCAAGGAGCAGATGGCCAAGGATA |
| | | | | AAGTCAGTCTGACCTGCATGATAACAGACTTCTTCCCTGAAGACATTACTGTGGAGTGGCAGTGG |
| | | | | AATGGGCAGCCAGCGGAGAACTACAAGAACACTCAGCCCATCATGGACACAGATGGCTCTTACTT |
| | | | | CGTCTACAGCAAGCTCAATGTGCAGAAGAGCAACTGGGAGGCAGGAAATACTTTCACCTGCTCTG |
| | | | | TGTTACATGAGGGCCTGCACAACCACCATACTGAGAAGAGCCTCTCCCACTCTCCTGGTAAA |
| 247. | human lambda | human | aa | GQPKAAPSVTLFPPSSEELQANKATLVCLISDFYPGAVTVAWKADSSPVKAGVETTTPSKQSNNK |
| | light | | | YAASSYLSLTPEQWKSHKSYSCQVTHEGSTVEKTVAPTECS |
| | chain | | | |
| | constant | | | |
| | region | | | |
| 248. | human lambda | human | nt | GGTCAGCCCAAGGCTGCCCCCTCGGTCACTCTGTTCCCACCCTCCTCTGAGGAGCTTCAAGCCAA |
| | light | | | CAAGGCCACACTGGTGTGTCTCATAAGTGACTTCTACCCGGGAGCCGTGACAGTGGCCTGGAAGG |
| | chain | | | CAGATAGCAGCCCCGTCAAGGCGGGAGTGGAGACCACCACACCCTCCAAACAAAGCAACAACAAG |
| | constant | | | TACGCGGCCAGCAGCTACCTGAGCCTGACGCCTGAGCAGTGGAAGTCCCACAAAAGCTACAGCTG |
| | region | | | CCAGGTCACGCATGAAGGGAGCACCGTGGAGAAGACAGTGGCCCCTACAGAATGTTCA |
| 249. | c-terminal | human | aa | DYKDDDDKSRTRSGSQLDGGLVLFSHRGTLDGGFRFRLSDGEHTSPGHFFRVTAQKQVLLSLKGS |
| | domain | | | QTLTVCPGSVQPLSSQTLRASSSAGTDPQLLLYRVVRGPQLGRLFHAQQDSTGEALVNFTQAEVY |
| | construct of | | | AGNILYEHEMPPEPFWEAHDTLELQLSSPPARDVAATLAVAVSFEAACPQRPSHLWKNKGLWVPE |
| | human | | | GQRARITVAALDASNLLASVPSPQRSEHDVLFQVTQFPSRGQLLVSEEPLHAGQPHFLQSQLAAG |
| | MCSP | | | QLVYAHGGGGTQQDGFHFRAHLQGPAGASVAGPQTSEAFAITVRDVNERPPQPQASVPLRLTRGS |
| | | | | RAPISRAQLSVVDPDSAPGEIEYEVQRAPHNGFLSLVGGGLGPVTRFTQADVDSGRLAFVANGSS |
| | | | | VAGIFQLSMSDGASPPLPMSLAVDILPSAIEVQLRAPLEVPQALGRSSLSQQQLRVVSDRFEPEA |
| | | | | AYRLIQGPQYGHLLVGGRPTSAFSQFQIDQGEVVFAFTNSSSSHDHFRVLALARGVNASAVVNVT |
| | | | | VRALLHVWAGGPWPQGATLRLDPTVLDAGELANRTDSVPRFRLLEGPRHGRVVRVPRARTEPGGS |
| | | | | QLVEQFTQQDLEDGRLGLEVGRPEGRAPGPAGDSLTLELWAQGVPPAVASLDFATEPYNAARPYS |
| | | | | VALLSVPEAARTEAGKPESSTPTGEPGPMASSPEPAVAKGGFLSFLEANMFSVIIPMCLVLLLLA |
| | | | | LILPLLFYLRKRNKTGKHDVQVLTAKPRNGLAGDTETFRKVEPGQAIPLTAVPGQGPPPGGQPDP |
| | | | | ELLQFCRTPNPALKNGQYWV |
| 250. | c-terminal | human | nt | ATGGGATGGAGCTGTATCATCCTCTTCTTGGTAGCAACAGCTACAGGTGTACACTCCGACTACAA |
| | domain | | | AGACGATGACGACAAGTCCCGTACGAGATCTGGATCCCAATTGGACGGCGGGCTCGTGCTGTTCT |
| | construct of | | | CACACAGAGGAACCCTGGATGGAGGCTTCCGCTTCCGCCTCTCTGACGGCGAGCACACTTCCCCC |
| | human | | | GGACACTTCTTCCGAGTGACGGCCCAGAAGCAAGTGCTCCTCTCGCTGAAGGGCAGCCAGACACT |
| | MCSP | | | GACTGTCTGCCCAGGGTCCGTCCAGCCACTCAGCAGTCAGACCCTCAGGGCCAGCTCCAGCGCAG |
| | | | | GCACTGACCCCCAGCTCCTGCTCTACCGTGTGGTGCGGGGCCCCCAGCTAGGCCGGCTGTTCCAC |
| | | | | GCCCAGCAGGACAGCACAGGGGAGGCCCTGGTGAACTTCACTCAGGCAGAGGTCTACGCTGGGAA |
| | | | | TATTCTGTATGAGCATGAGATGCCCCCCGAGCCCTTTTGGGAGGCCCATGATACCCTAGAGCTCC |
| | | | | AGCTGTCCTCGCCGCCTGCCCGGGACGTGGCCGCCACCCTTGCTGTGGCTGTGTCTTTTGAGGCT |
| | | | | GCCTGTCCCCAGCGCCCCAGCCACCTCTGGAAGAACAAAGGTCTCTGGGTCCCCGAGGGCCAGCG |
| | | | | GGCCAGGATCACCGTGGCTGCTCTGGATGCCTCCAATCTCTTGGCCAGCGTTCCATCACCCCAGC |
| | | | | GCTCAGAGCATGATGTGCTCTTCCAGGTCACACAGTTCCCCAGCCGCGGCCAGCTGTTGGTGTCC |
| | | | | GAGGAGCCCCTCCATGCTGGGCAGCCCCACTTCCTGCAGTCCCAGCTGGCTGCAGGGCAGCTAGT |
| | | | | GTATGCCCACGGCGGTGGGGGCACCCAGCAGGATGGCTTCCACTTTCGTGCCCACCTCCAGGGGC |
| | | | | CAGCAGGGGCCTCCGTGGCTGGACCCCAAACCTCAGAGGCCTTTGCCATCACGGTGAGGGATGTA |
| | | | | AATGAGCGGCCCCCTCAGCCACAGGCCTCTGTCCCACTCCGGCTCACCCGAGGCTCTCGTGCCCC |
| | | | | CATCTCCCGGGCCCAGCTGAGTGTGGTGGACCCAGACTCAGCTCCTGGGGAGATTGAGTACGAGG |
| | | | | TCCAGCGGGCACCCCACAACGGCTTCCTCAGCCTGGTGGGTGGTGGCCTGGGGCCCGTGACCCGC |
| | | | | TTCACGCAAGCCGATGTGGATTCAGGGCGGCTGGCCTTCGTGGCCAACGGGAGCAGCGTGGCAGG |
| | | | | CATCTTCCAGCTGAGCATGTCTGATGGGGCCAGCCCACCCCTGCCCATGTCCCTGGCTGTGGACA |
| | | | | TCCTACCATCCGCCATCGAGGTGCAGCTGCGGGCACCCCTGGAGGTGCCCCAAGCTTTGGGGCGC |
| | | | | TCCTCACTGAGCCAGCAGCAGCTCCGGGTGGTTTCAGATCGGGAGGAGCCAGAGGCAGCATACCG |
| | | | | GTTGATCCAGGGACCCCAGTATGGGCATCTCCTGGTGGGCGGGCGGCCCACCTCGGCCTTCAGCC |
| | | | | AATTCCAGATAGACCAGGGCGAGGTGGTCTTTGCCTTCACCAACTCCTCCTCCTCTCATGACCAC |
| | | | | TTCAGAGTCCTGGCACTGGCTAGGGGTGTCAATGCATCAGCCGTAGTGAACGTCACTGTGAGGGC |
| | | | | TCTGCTGCATGTGTGGGCAGGTGGGCCATGGCCCCAGGGTGCCACCCTGCGCCTGGACCCCACCG |
| | | | | TCCTAGATGCTGGCGAGCTGGCCAACCGCACAGACAGTGTGCCGCGCTTCCGCCTCCTGGAGGGA |
| | | | | CCCCGGCATGGCCGCGTGGTCCGCGTGCCCCGAGCCAGGACGGAGCCCGGGGGCAGCCAGCTGGT |
| | | | | GGAGCAGTTCACTCAGCAGGACCTTGAGGACGGGAGGCTGGGGCTGGAGGTGGGCAGGCCAGAGG |
| | | | | GGAGGGCCCCCGGCCCCGCAGGTGACAGTCTCACTCTGGAGCTGTGGGCACAGGGCGTCCCGCCT |
| | | | | GCTGTGGCCTCCCTGGACTTTGCCACTGAGCCTTACAATGCTGCCCGGCCCTACAGCGTGGCCCT |
| | | | | GCTCAGTGTCCCCGAGGCCGCCCGGACGGAAGCAGGGAAGCCAGAGAGCAGCACCCCCACAGGCG |
| | | | | AGCCAGGCCCCATGGCATCCAGCCCTGAGCCCGCTGTGGCCAAGGGAGGCTTCCTGAGCTTTCTA |
| | | | | GAGGCCAACATGTTCAGCGTCATCATCCCCATGTGCCTGGTACTTCTGCTCCTGGCGCTCATCCT |
| | | | | GCCCCTGCTCTTCTACCTCCGAAAACGCAACAAGACGGGCAAGCATGACGTCCAGGTCCTGACTG |
| | | | | CCAAGCCCCGCAACGGCCTGGCTGGTGACACCGAGACCTTTCGCAAGGTGGAGCCAGGCCAGGCC |
| | | | | ATCCCGCTCACAGCTGTGCCTGGCCAGGGGCCCCCTCCAGGAGGCCAGCCTGACCCAGAGCTGCT |
| | | | | GCAGTTCTGCCGGACACCCAACCCTGCCCTTAAGAATGGCCAGTACTGGGTG |
| 251. | partial | cynomolgus | aa | PSNGRVVLRAAPGTEVRSETQAQLDGGLVLFSHRGTLDGGFREGLSDGEHTSSGHFFRVTAQKQV |
| | sequence of | | | LLSLEGSRTLTVCPGSVQPLSSQTLRASSSAGTDPQLLLYRVVRGPQLGRLFHAQQDSTGEALVN |
| | cynomolgus | | | FTQAEVYAGNILYEHEMPTEPFWEAHDTLELQLSSPPARDVAATLAVAVSFEAACPQRPSHLWKN |
| | MCSP | | | KGLWVPEGQRAKITMAALDASNLLASVPSSQRLEHDVLFQVTQFPSRGQLLVSEEPLHAGQPHFL |
| | | | | QSQLAAGQLVYAHGGGGTQQDGFHFRAHLQGPAGATVAGPQTSEAFAITVRDVNERPPQPQASVP |
| | | | | LRITRGSRAPISRAQLSVVDPDSAPGEIEYEVQRAPHNGFLSLVGGGPGPVNRFTQADVDSGRLA |
| | | | | FVANGSSVAGVFQLSMSDGASPPLPMSLAVDILPSAIEVQLQAPLEVPQALGRSSLSQQQLRVVS |
| | | | | DREEPEAAYRLIQGPKYGHLLVGGQPASAFSQLQIDQGEVVFAFTNFSSSHDHFRVLALARGVNA |
| | | | | SAVVNITVRALLHVWAGGPWPQGATLRLDPTILDAGELANRTGSVPRFRLLEGPRHGRVVRVPRA |
| | | | | RMEPGGSQLVEQFTQQDLEDGRLGLEVGRPEGRAPSPTGDSLTLELWAQGVPPAVASLDFATEPY |
| | | | | NAARPYSVALLSVPEATRTEAGKPESSTPTGEPGPMASSPVPAVAKGGFLGFLEANMFSVIIPXC |
| | | | | LVLLLLALILPLLFYLRKRNKTGKHDVQVLTAKPRNGLAGDTETFRKVEPGQAIPLTAVPGQGPP |
| | | | | PGGQPDPELLQFCRTPNPALKNGQYWV |
| 252. | partial | cynomolgus | nt | CCCAGCAACGGACGGGTAGTGCTGCGGGCGGCGCCGGGCACCGAGGTGCGCAGCTTCACGCAGGC |
| | sequence of | | | CCAGCTGGATGGCGGACTCGTGCTGTTCTCACACAGAGGAACCCTGGATGGAGGCTTCCGCTTCG |
| | cynomolgus | | | GCCTCTCCGATGGCGAGCACACTTCCTCTGGACACTTCTTCCGAGTGACGGCCCAGAAGCAAGTG |
| | MCSP | | | CTCCTCTCGCTGGAGGGCAGCCGGACACTGACTGTCTGCCCAGGGTCCGTGCAGCCACTCAGCAG |
| | | | | TCAGACCCTCAGAGCCAGCTCCAGCGCAGGCACCGACCCCCAGCTCCTGCTCTACCGTGTGGTGC |
| | | | | GGGGCCCCCAGCTAGGCCGGCTGTTCCATGCCCAGCAGGACAGCACAGGGGAGGCCCTGGTGAAC |
| | | | | TTCACTCAGGCAGAGGTCTATGCTGGGAATATTCTGTATGAGCATGAGATGCCCACCGAGCCCTT |
| | | | | CTGGGAGGCCCATGATACCCTAGAGCTCCAGCTGTCCTCACCACCTGCCCGGGACGTGGCTGCCA |
| | | | | CCCTTGCTGTGGCTGTGTCTTTTGAGGCTGCCTGTCCCCAGCGCCCCAGCCACCTCTGGAAGAAC |
| | | | | AAAGGTCTCTGGGTCCCCGAGGGCCAGCGGGCCAAGATCACCATGGCTGCCCTGGATGCCTCCAA |
| | | | | CCTCTTGGCCAGCGTTCCATCATCCCAGCGCCTAGAGCATGATGTGCTCTTCCAGGTCACGCAGT |
| | | | | TCCCCAGCCGGGGCCAGCTATTGGTGTCTGAGGAGCCCCTCCACGCTGGGCAGCCCCACTTCCTG |
| | | | | CAGTCCCAGCTGGCTGCAGGGCAGCTAGTGTATGCCCACGGCGGTGGGGGTACCCAACAGGATGG |
| | | | | CTTCCACTTTCGTGCCCACCTCCAGGGGCCAGCAGGGGCCACCGTGGCTGGACCCCAAACCTCAG |
| | | | | AGGCTTTTGCCATCACGGTGCGGGATGTAAATGAGCGGCCCCCTCAGCCACAGGCCTCTGTCCCA |
| | | | | CTCCGGATCACCCGAGGCTCTCGAGCCCCCATCTCCCGGGCCCAGCTGAGTGTCGTGGACCCAGA |
| | | | | CTCAGCTCCTGGGGAGATTGAGTATGAGGTCCAGCGGGCACCCCACAACGGCTTCCTCAGCCTGG |
| | | | | TGGGTGGTGGCCCGGGGCCCGTGAACCGCTTCACGCAAGCCGATGTGGATTCGGGGCGGCTGGCC |
| | | | | TTCGTGGCCAACGGGAGCAGCGTAGCAGGCGTCTTCCAGCTGAGCATGTCTGATGGGGCCAGCCC |
| | | | | ACCGCTGCCCATGTCCCTGGCCGTGGACATCCTACCATCCGCCATCGAGGTGCAGCTGCAGGCAC |
| | | | | CCCTGGAGGTGCCCCAAGCTTTGGGGCGCTCCTCACTGAGCCAGCAGCAGCTCCGGGTGGTTTCA |
| | | | | GATAGGGAGGAGCCAGAGGCAGCATACCGCCTCATCCAGGGACCAAAGTACGGGCATCTCCTGGT |
| | | | | GGGTGGGCAGCCCGCCTCGGCCTTCAGCCAACTCCAGATAGACCAGGGCGAGGTGGTCTTTGCCT |
| | | | | TCACCAACTTCTCCTCCTCTCATGACCACTTCAGAGTCCTGGCACTGGCTAGGGGTGTCAACGCA |
| | | | | TCAGCCGTAGTGAACATCACTGTGAGGGCTCTGCTGCACGTGTGGGCAGGTGGGCCATGGCCCCA |
| | | | | GGGTGCTACCCTGCGCCTGGACCCAACCATCCTAGATGCTGGCGAGCTGGCCAACCGCACAGGCA |
| | | | | GTGTGCCCCGCTTCCGCCTCCTGGAGGGACCCCGGCATGGCCGCGTGGTCCGTGTGCCCCGAGCC |
| | | | | AGGATGGAGCCTGGGGGCAGCCAGCTGGTGGAGCAGTTCACTCAGCAGGACCTTGAGGATGGGAG |
| | | | | GCTGGGGCTGGAGGTGGGCAGGCCAGAGGGAAGGGCCCCCAGCCCCACAGGCGACAGTCTCACTC |
| | | | | TGGAGCTGTGGGCACAGGGCGTCCCACCTGCTGTGGCCTCCCTGGACTTTGCCACTGAGCCTTAC |
| | | | | AATGCTGCCCGGCCCTACAGCGTGGCCCTGCTCAGTGTCCCCGAGGCCACCCGGACGGAAGCAGG |
| | | | | GAAGCCAGAGAGCAGCACCCCCACAGGCGAGCCAGGCCCCATGGCATCTAGCCCTGTGCCTGCTG |
| | | | | TGGCCAAGGGAGGCTTCCTGGGCTTCCTTGAGGCCAACATGTTCAGTGTCATCATCCCCRTGTGC |
| | | | | CTGGTCCTTCTGCTCCTGGCGCTCATCTTGCCCCTGCTCTTCTACCTCCGAAAACGCAACAAGAC |
| | | | | GGGCAAGCATGACGTCCAGGTCCTGACTGCCAAGCCCCGCAATGGTCTGGCTGGTGACACTGAGA |
| | | | | CCTTTCGCAAGGTGGAGCCAGGCCAGGCCATCCCGCTCACAGCTGTGCCTGGCCAGGGGCCCCCT |
| | | | | CCGGGAGGCCAGCCTGACCCAGAGCTGCTGCAGTTCTGCCGGACACCCAACCCTGCCCTTAAGAA |
| | | | | TGGCCAGTACTGGGTG |
| 253. | PCR primer for | artificial | nt | AGAGTTCTGGGCCTCTGC |
| | CD3ε | | | |
| | chain - | | | |
| | forward | | | |
| | primer | | | |
| 254. | PCR primer | artificial | nt | CGGATGGGCTCATAGTCTG |
| | for CD3ε | | | |
| | chain - | | | |
| | reverse | | | |
| | primer | | | |
| 255. | His6-human | artificial | aa | HHHHHHQDGNEEMGGITQTPYKVSISGTTVILTCPQYPGSEILWQHNDKNIGGDEDDKNIGSDED |
| | CD3ε | | | HLSLKEFSELEQSGYYVCYPRGSKPEDANFYLYLRARVCENCMEMDVMSVATIVIVDICITGGLL |
| | | | | LLVYYWSKNRKAKAKPVTRGAGAGGRQRGQNKERPPPVPNPDYEPIRKGQRDLYSGLNQRRI |
| 256. | His6-human | artificial | nt | ATGGGATGGAGCTGTATCATCCTCTTCTTGGTAGCAACAGCTACAGGTGTACACTCCCATCATCA |
| | CD3ε | | | CCATCATCATCAAGATGGTAATGAAGAAATGGGTGGTATTACACAGACACCATATAAAGTCTCCA |
| | | | | TCTCTGGAACCACAGTAATATTGACATGCCCTCAGTATCCTGGATCTGAAATACTATGGCAACAC |
| | | | | AATGATAAAAACATAGGCGGTGATGAGGATGATAAAAACATAGGCAGTGATGAGGATCACCTGTC |
| | | | | ACTGAAGGAATTTTCAGAATTGGAGCAAAGTGGTTATTATGTCTGCTACCCCAGAGGAAGCAAAC |
| | | | | CAGAAGATGCGAACTTTTATCTCTACCTGAGGGCACGCGTGTGTGAGAACTGCATGGAGATGGAT |
| | | | | GTGATGTCGGTGGCCACAATTGTCATAGTGGACATCTGCATCACTGGGGGCTTGCTGCTGCTGGT |
| | | | | TTACTACTGGAGCAAGAATAGAAAGGCCAAGGCCAAGCCTGTGACACGAGGAGCGGGTGCTGGCG |
| | | | | GCAGGCAAAGGGGACAAAACAAGGAGAGGCCACCACCTGTTCCCAACCCAGACTATGAGCCCATC |
| | | | | CGGAAAGGCCAGCGGGACCTGTATTCTGGCCTGAATCAGAGACGCATC |
| 257. | CD33 AH3 HL x | artificial | aa | QVQLVQSGAEVKKPGESVKVSCKASGYTFTNYGMNWVRQAPGQGLEWMGWINTYTGEPTYADDFK |
| | H2C HL | | | GRVTMSSDTSTSTAYLEINSLRSDDTAIYYCARWSWSDGYYVYFDYWGQGTTVTVSSggggsggg |
| | | | | gsggggsDIVMTQSPDSLTVSLGERTTINCKSSQSVLDSSKNKNSLAWYQQKPGQPPKLLLSWAS |
| | | | | TRESGIPDRFSGSGSGTDFTLTIDSLQPEDSATYYCQQSAHFPITFGQGTRLEIKSGGGGSEVQL |
| | | | | VESGGGLVQPGGSLKLSCAASGFTENKYAMNWVRQAPGKGLEWVARIRSKYNNYATYYADSVKDR |
| | | | | FTISRDDSKNTAYLQMNNLKTEDTAVYYCVRHGNFGNSYISYWAYWGQGTLVTVSSGGGGSGGGG |
| | | | | SGGGGSQTVVTQEPSLTVSPGGTVTLTCGSSTGAVTSGYYPNWVQQKPGQAPRGLIGGTKFLAPG |
| | | | | TPARFSGSLLGGKAALTLSGVQPEDEAEYYCALWYSNRWVFGGGTKLTVL |
| 258. | CD33 AH3 HL x | artificial | nt | CAGGTGCAGCTGGTGCAGTCTGGAGCTGAGGTGAAAAAGCCTGGAGAGTCAGTCAAGGTCTCCTG |
| | H2C HL | | | CAAGGCTAGCGGGTATACCTTCACAAACTATGGAATGAACTGGGTGAGGCAGGCTCCAGGACAGG |
| | | | | GTTTAGAGTGGATGGGCTGGATAAACACCTACACTGGAGAGCCAACATATGCTGATGACTTCAAG |
| | | | | GGACGGGTTACCATGTCTTCGGATACCTCTACCAGCACTGCCTATTTGGAAATCAACAGCCTCAG |
| | | | | AAGTGATGACACGGCTATATATTACTGTGCGCGCTGGAGTTGGAGTGATGGTTACTACGTTTACT |
| | | | | TTGACTACTGGGGCCAAGGCACTACGGTCACCGTCTCCTCAGGTGGTGGTGGTTCTGGCGGCGGC |
| | | | | GGCTCCGGTGGTGGTGGTTCTGACATCGTGATGACACAGTCTCCAGACTCCCTGACTGTGTCTCT |
| | | | | GGGCGAGAGGACCACCATCAACTGCAAGTCCAGCCAGAGTGTTTTAGACAGCTCCAAGAATAAGA |
| | | | | ACTCCTTAGCTTGGTACCAGCAGAAACCAGGACAGCCTCCTAAATTACTCCTTTCCTGGGCATCT |
| | | | | ACGCGGGAATCCGGGATCCCTGACCGATTCAGTGGCAGCGGGTCTGGGACAGATTTCACTCTCAC |
| | | | | TATTGACAGCCTGCAGCCTGAAGATTCTGCAACTTACTATTGTCAACAGTCTGCCCACTTCCCGA |
| | | | | TCACCTTTGGCCAAGGGACACGACTGGAGATTAAATCCGGAGGTGGTGGCTCCGAGGTGCAGCTG |
| | | | | GTCGAGTCTGGAGGAGGATTGGTGCAGCCTGGAGGGTCATTGAAACTCTCATGTGCAGCCTCTGG |
| | | | | ATTCACCTTCAATAAGTACGCCATGAACTGGGTCCGCCAGGCTCCAGGAAAGGGTTTGGAATGGG |
| | | | | TTGCTCGCATAAGAAGTAAATATAATAATTATGCAACATATTATGCCGATTCAGTGAAAGACAGG |
| | | | | TTCACCATCTCCAGAGATGATTCAAAAAACACTGCCTATCTACAAATGAACAACTTGAAAACTGA |
| | | | | GGACACTGCCGTGTACTACTGTGTGAGACATGGGAACTTCGGTAATAGCTACATATCCTACTGGG |
| | | | | CTTACTGGGGCCAAGGGACTCTGGTCACCGTCTCCTCAGGTGGTGGTGGTTCTGGCGGCGGCGGC |
| | | | | TCCGGTGGTGGTGGTTCTCAGACTGTTGTGACTCAGGAACCTTCACTCACCGTATCACCTGGTGG |
| | | | | AACAGTCACACTCACTTGTGGCTCCTCGACTGGGGCTGTTACATCTGGCTACTACCCAAACTGGG |
| | | | | TCCAACAAAAACCAGGTCAGGCACCCCGTGGTCTAATAGGTGGGACTAAGTTCCTCGCCCCCGGT |
| | | | | ACTCCTGCCAGATTCTCAGGCTCCCTGCTTGGAGGCAAGGCTGCCCTCACCCTCTCAGGGGTACA |
| | | | | GCCAGAGGATGAGGCAGAATATTACTGTGCTCTATGGTACAGCAACCGCTGGGTGTTCGGTGGAG |
| | | | | GAACCAAACTGACTGTCCTA |
| 259. | CD33 AH3 HL x | artificial | aa | QVQLVQSGAEVKKPGESVKVSCKASGYTFTNYGMNWVRQAPGQGLEWMGWINTYTGEPTYADDFK |
| | F12Q HL | | | GRVTMSSDTSTSTAYLEINSLRSDDTAIYYCARWSWSDGYYVYFDYWGQGTTVTVSSggggsggg |
| | | | | gsggggsDIVMTQSPDSLTVSLGERTTINCKSSQSVLDSSKNKNSLAWYQQKPGQPPKLLLSWAS |
| | | | | TRESGIPDRFSGSGSGTDFTLTIDSLQPEDSATYYCQQSAHFPITFGQGTRLEIKSGGGGSEVQL |
| | | | | VESGGGLVQPGGSLKLSCAASGFTFNSYAMNWVRQAPGKGLEWVARIRSKYNNYATYYADSVKGR |
| | | | | FTISRDDSKNTAYLQMNNLKTEDTAVYYCVRHGNFGNSYVSWWAYWGQGTLVTVSSGGGGSGGGG |
| | | | | SGGGGSQTVVTQEPSLTVSPGGTVTLTCGSSTGAVTSGNYPNWVQQKPGQAPRGLIGGTKFLAPG |
| | | | | TPARFSGSLLGGKAALTLSGVQPEDEAEYYCVLWYSNRWVFGGGTKLTVL |
| 260. | CD33 AH3 HL x | artificial | nt | CAGGTGCAGCTGGTGCAGTCTGGAGCTGAGGTGAAAAAGCCTGGAGAGTCAGTCAAGGTCTCCTG |
| | F12Q HL | | | CAAGGCTAGCGGGTATACCTTCACAAACTATGGAATGAACTGGGTGAGGCAGGCTCCAGGACAGG |
| | | | | GTTTAGAGTGGATGGGCTGGATAAACACCTACACTGGAGAGCCAACATATGCTGATGACTTCAAG |
| | | | | GGACGGGTTACCATGTCTTCGGATACCTCTACCAGCACTGCCTATTTGGAAATCAACAGCCTCAG |
| | | | | AAGTGATGACACGGCTATATATTACTGTGCGCGCTGGAGTTGGAGTGATGGTTACTACGTTTACT |
| | | | | TTGACTACTGGGGCCAAGGCACTACGGTCACCGTCTCCTCAGGTGGTGGTGGTTCTGGCGGCGGC |
| | | | | GGCTCCGGTGGTGGTGGTTCTGACATCGTGATGACACAGTCTCCAGACTCCCTGACTGTGTCTCT |
| | | | | GGGCGAGAGGACCACCATCAACTGCAAGTCCAGCCAGAGTGTTTTAGACAGCTCCAAGAATAAGA |
| | | | | ACTCCTTAGCTTGGTACCAGCAGAAACCAGGACAGCCTCCTAAATTACTCCTTTCCTGGGCATCT |
| | | | | ACGCGGGAATCCGGGATCCCTGACCGATTCAGTGGCAGCGGGTCTGGGACAGATTTCACTCTCAC |
| | | | | TATTGACAGCCTGCAGCCTGAAGATTCTGCAACTTACTATTGTCAACAGTCTGCCCACTTCCCGA |
| | | | | TCACCTTTGGCCAAGGGACACGACTGGAGATTAAATCCGGAGGTGGTGGCTCCGAGGTGCAGCTG |
| | | | | GTCGAGTCTGGAGGAGGATTGGTGCAGCCTGGAGGGTCATTGAAACTCTCATGTGCAGCCTCTGG |
| | | | | ATTCACCTTCAATAGCTACGCCATGAACTGGGTCCGCCAGGCTCCAGGAAAGGGTTTGGAATGGG |
| | | | | TTGCTCGCATAAGAAGTAAATATAATAATTATGCAACATATTATGCCGATTCAGTGAAAGGCAGG |
| | | | | TTCACCATCTCCAGAGATGATTCAAAAAACACTGCCTATCTACAAATGAACAACTTGAAAACTGA |
| | | | | GGACACTGCCGTGTACTACTGTGTGAGACATGGGAACTTCGGTAATAGCTACGTTTCCTGGTGGG |
| | | | | CTTACTGGGGCCAAGGGACTCTGGTCACCGTCTCCTCAGGTGGTGGTGGTTCTGGCGGCGGCGGC |
| | | | | TCCGGTGGTGGTGGTTCTCAGACTGTTGTGACTCAGGAACCTTCACTCACCGTATCACCTGGTGG |
| | | | | AACAGTCACACTCACTTGTGGCTCCTCGACTGGGGCTGTTACATCTGGCAACTACCCAAACTGGG |
| | | | | TCCAACAAAAACCAGGTCAGGCACCCCGTGGTCTAATAGGTGGGACTAAGTTCCTCGCCCCCGGT |
| | | | | ACTCCTGCCAGATTCTCAGGCTCCCTGCTTGGAGGCAAGGCTGCCCTCACCCTCTCAGGGGTACA |
| | | | | GCCAGAGGATGAGGCAGAATATTACTGTGTTCTATGGTACAGCAACCGCTGGGTGTTCGGTGGAG |
| | | | | GAACCAAACTGACTGTCCTA |
| 261. | CD33 AH3 HL x | artificial | aa | QVQLVQSGAEVKKPGESVKVSCKASGYTFTNYGMNWVRQAPGQGLEWMGWINTYTGEPTYADDFK |
| | I2C HL | | | GRVTMSSDTSTSTAYLEINSLRSDDTAIYYCARWSWSDGYYVYFDYWGQGTTVTVSSggggsggg |
| | | | | gsggggsDIVMTQSPDSLTVSLGERTTINCKSSQSVLDSSKNKNSLAWYQQKPGQPPKLLLSWAS |
| | | | | TRESGIPDRFSGSGSGTDFTLTIDSLQPEDSATYYCQQSAHFPITFGQGTRLEIKSGGGGSEVQL |
| | | | | VESGGGLVQPGGSLKLSCAASGFTFNKYAMNWVRQAPGKGLEWVARIRSKYNNYATYYADSVKDR |
| | | | | FTISRDDSKNTAYLQMNNLKTEDTAVYYCVRHGNFGNSYISYWAYWGQGTLVTVSSGGGGSGGGG |
| | | | | SGGGGSQTVVTQEPSLTVSPGGTVTLTCGSSTGAVTSGNYPNWVQQKPGQAPRGLIGGTKFLAPG |
| | | | | TPARFSGSLLGGKAALTLSGVQPEDEAEYYCVLWYSNRWVFGGGTKLTVL |
| 262. | CD33 AH3 HL x | artificial | nt | CAGGTGCAGCTGGTGCAGTCTGGAGCTGAGGTGAAAAAGCCTGGAGAGTCAGTCAAGGTCTCCTG |
| | I2C HL | | | CAAGGCTAGCGGGTATACCTTCACAAACTATGGAATGAACTGGGTGAGGCAGGCTCCAGGACAGG |
| | | | | GTTTAGAGTGGATGGGCTGGATAAACACCTACACTGGAGAGCCAACATATGCTGATGACTTCAAG |
| | | | | GGACGGGTTACCATGTCTTCGGATACCTCTACCAGCACTGCCTATTTGGAAATCAACAGCCTCAG |
| | | | | AAGTGATGACACGGCTATATATTACTGTGCGCGCTGGAGTTGGAGTGATGGTTACTACGTTTACT |
| | | | | TTGACTACTGGGGCCAAGGCACTACGGTCACCGTCTCCTCAGGTGGTGGTGGTTCTGGCGGCGGC |
| | | | | GGCTCCGGTGGTGGTGGTTCTGACATCGTGATGACACAGTCTCCAGACTCCCTGACTGTGTCTCT |
| | | | | GGGCGAGAGGACCACCATCAACTGCAAGTCCAGCCAGAGTGTTTTAGACAGCTCCAAGAATAAGA |
| | | | | ACTCCTTAGCTTGGTACCAGCAGAAACCAGGACAGCCTCCTAAATTACTCCTTTCCTGGGCATCT |
| | | | | ACGCGGGAATCCGGGATCCCTGACCGATTCAGTGGCAGCGGGTCTGGGACAGATTTCACTCTCAC |
| | | | | TATTGACAGCCTGCAGCCTGAAGATTCTGCAACTTACTATTGTCAACAGTCTGCCCACTTCCCGA |
| | | | | TCACCTTTGGCCAAGGGACACGACTGGAGATTAAATCCGGAGGTGGTGGCTCCGAGGTGCAGCTG |
| | | | | GTCGAGTCTGGAGGAGGATTGGTGCAGCCTGGAGGGTCATTGAAACTCTCATGTGCAGCCTCTGG |
| | | | | ATTCACCTTCAATAAGTACGCCATGAACTGGGTCCGCCAGGCTCCAGGAAAGGGTTTGGAATGGG |
| | | | | TTGCTCGCATAAGAAGTAAATATAATAATTATGCAACATATTATGCCGATTCAGTGAAAGACAGG |
| | | | | TTCACCATCTCCAGAGATGATTCAAAAAACACTGCCTATCTACAAATGAACAACTTGAAAACTGA |
| | | | | GGACACTGCCGTGTACTACTGTGTGAGACATGGGAACTTCGGTAATAGCTACATATCCTACTGGG |
| | | | | CTTACTGGGGCCAAGGGACTCTGGTCACCGTCTCCTCAGGTGGTGGTGGTTCTGGCGGCGGCGGC |
| | | | | TCCGGTGGTGGTGGTTCTCAGACTGTTGTGACTCAGGAACCTTCACTCACCGTATCACCTGGTGG |
| | | | | AACAGTCACACTCACTTGTGGCTCCTCGACTGGGGCTGTTACATCTGGCAACTACCCAAACTGGG |
| | | | | TCCAACAAAAACCAGGTCAGGCACCCCGTGGTCTAATAGGTGGGACTAAGTTCCTCGCCCCCGGT |
| | | | | ACTCCTGCCAGATTCTCAGGCTCCCTGCTTGGAGGCAAGGCTGCCCTCACCCTCTCAGGGGTACA |
| | | | | GCCAGAGGATGAGGCAGAATATTACTGTGTTCTATGGTACAGCAACCGCTGGGTGTTCGGTGGAG |
| | | | | GAACCAAACTGACTGTCCTA |
| 263. | CD33 AF5 HL x | artificial | aa | QVQLVQSGAEVKKPGASVKVSCKASGYTFTNYGMNWVKQAPGQGLKWMGWINTYTGEPTYADDFK |
| | H2C HL | | | GRVTMTSDTSTSTAYLELHNLRSDDTAVYYCARWSWSDGYYVYFDYWGQGTTVTVSSggggsggg |
| | | | | gsggggsDIVMTQSPDSLTVSLGERTTINCKSSQSVLDSSKNKNSLAWYQQKPGQPPKLLLSWAS |
| | | | | TRESGIPDRFSGSGSGTDFTLTIDSLQPEDSATYYCQQSAHFPITFGQGTRLEIKSGGGGSEVQL |
| | | | | VESGGGLVQPGGSLKLSCAASGFTFNKYAMNWVRQAPGKGLEWVARIRSKYNNYATYYADSVKDR |
| | | | | FTISRDDSKNTAYLQMNNLKTEDTAVYYCVRHGNFGNSYISYWAYWGQGTLVTVSSGGGGSGGGG |
| | | | | SGGGGSQTVVTQEPSLTVSPGGTVTLTCGSSTGAVTSGYYPNWVQQKPGQAPRGLIGGTKFLAPG |
| | | | | TPARFSGSLLGGKAALTLSGVQPEDEAEYYCALWYSNRWVFGGGTKLTVL |
| 264. | CD33 AF5 HL x | artificial | nt | CAGGTGCAGCTGGTGCAGTCTGGAGCTGAGGTGAAGAAGCCTGGAGCGTCAGTCAAGGTCTCCTG |
| | H2C HL | | | CAAGGCTAGCGGGTATACCTTCACAAACTATGGAATGAACTGGGTGAAGCAGGCTCCAGGACAGG |
| | | | | GTTTAAAGTGGATGGGCTGGATAAACACCTACACTGGAGAGCCAACATATGCTGATGACTTCAAG |
| | | | | GGACGGGTTACCATGACTTCGGATACCTCTACCAGCACTGCCTATTTGGAACTCCACAACCTCAG |
| | | | | AAGTGATGACACGGCTGTATATTACTGTGCGCGCTGGAGTTGGAGTGATGGTTACTACGTTTACT |
| | | | | TTGACTACTGGGGCCAAGGCACTACGGTCACCGTCTCCTCAGGTGGTGGTGGTTCTGGCGGCGGC |
| | | | | GGCTCCGGTGGTGGTGGTTCTGACATCGTGATGACACAGTCTCCAGACTCCCTGACTGTGTCTCT |
| | | | | GGGCGAGAGGACCACCATCAACTGCAAGTCCAGCCAGAGTGTTTTAGACAGCTCCAAGAATAAGA |
| | | | | ACTCCTTAGCTTGGTACCAGCAGAAACCAGGACAGCCTCCTAAATTACTCCTTTCCTGGGCATCT |
| | | | | ACGCGGGAATCCGGGATCCCTGACCGATTCAGTGGCAGCGGGTCTGGGACAGATTTCACTCTCAC |
| | | | | TATTGACAGCCTGCAGCCTGAAGATTCTGCAACTTACTATTGTCAACAGTCTGCCCACTTCCCGA |
| | | | | TCACCTTTGGCCAAGGGACACGACTGGAGATTAAATCCGGAGGTGGTGGCTCCGAGGTGCAGCTG |
| | | | | GTCGAGTCTGGAGGAGGATTGGTGCAGCCTGGAGGGTCATTGAAACTCTCATGTGCAGCCTCTGG |
| | | | | ATTCACCTTCAATAAGTACGCCATGAACTGGGTCCGCCAGGCTCCAGGAAAGGGTTTGGAATGGG |
| | | | | TTGCTCGCATAAGAAGTAAATATAATAATTATGCAACATATTATGCCGATTCAGTGAAAGACAGG |
| | | | | TTCACCATCTCCAGAGATGATTCAAAAAACACTGCCTATCTACAAATGAACAACTTGAAAACTGA |
| | | | | GGACACTGCCGTGTACTACTGTGTGAGACATGGGAACTTCGGTAATAGCTACATATCCTACTGGG |
| | | | | CTTACTGGGGCCAAGGGACTCTGGTCACCGTCTCCTCAGGTGGTGGTGGTTCTGGCGGCGGCGGC |
| | | | | TCCGGTGGTGGTGGTTCTCAGACTGTTGTGACTCAGGAACCTTCACTCACCGTATCACCTGGTGG |
| | | | | AACAGTCACACTCACTTGTGGCTCCTCGACTGGGGCTGTTACATCTGGCTACTACCCAAACTGGG |
| | | | | TCCAACAAAAACCAGGTCAGGCACCCCGTGGTCTAATAGGTGGGACTAAGTTCCTCGCCCCCGGT |
| | | | | ACTCCTGCCAGATTCTCAGGCTCCCTGCTTGGAGGCAAGGCTGCCCTCACCCTCTCAGGGGTACA |
| | | | | GCCAGAGGATGAGGCAGAATATTACTGTGCTCTATGGTACAGCAACCGCTGGGTGTTCGGTGGAG |
| | | | | GAACCAAACTGACTGTCCTA |
| 265. | CD33 AF5 HL x | artificial | aa | QVQLVQSGAEVKKPGASVKVSCKASGYTFTNYGMNWVKQAPGQGLKWMGWINTYTGEPTYADDFK |
| | F12Q HL | | | GRVTMTSDTSTSTAYLELHNLRSDDTAVYYCARWSWSDGYYVYFDYWGQGTTVTVSSggggsggg |
| | | | | gsggggsDIVMTQSPDSLTVSLGERTTINCKSSQSVLDSSKNKNSLAWYQQKPGQPPKLLLSWAS |
| | | | | TRESGIPDRFSGSGSGTDFTLTIDSLQPEDSATYYCQQSAHFPITFGQGTRLEIKSGGGGSEVQL |
| | | | | VESGGGLVQPGGSLKLSCAASGFTFNSYAMNWVRQAPGKGLEWVARIRSKYNNYATYYADSVKGR |
| | | | | FTISRDDSKNTAYLQMNNLKTEDTAVYYCVRHGNFGNSYVSWWAYWGQGTLVTVSSGGGGSGGGG |
| | | | | SGGGGSQTVVTQEPSLTVSPGGTVTLTCGSSTGAVTSGNYPNWVQQKPGQAPRGLIGGTKFLAPG |
| | | | | TPARFSGSLLGGKAALTLSGVQPEDEAEYYCVLWYSNRWVFGGGTKLTVL |
| 266. | CD33 AF5 HL x | artificial | nt | CAGGTGCAGCTGGTGCAGTCTGGAGCTGAGGTGAAGAAGCCTGGAGCGTCAGTCAAGGTCTCCTG |
| | F12Q HL | | | CAAGGCTAGCGGGTATACCTTCACAAACTATGGAATGAACTGGGTGAAGCAGGCTCCAGGACAGG |
| | | | | GTTTAAAGTGGATGGGCTGGATAAACACCTACACTGGAGAGCCAACATATGCTGATGACTTCAAG |
| | | | | GGACGGGTTACCATGACTTCGGATACCTCTACCAGCACTGCCTATTTGGAACTCCACAACCTCAG |
| | | | | AAGTGATGACACGGCTGTATATTACTGTGCGCGCTGGAGTTGGAGTGATGGTTACTACGTTTACT |
| | | | | TTGACTACTGGGGCCAAGGCACTACGGTCACCGTCTCCTCAGGTGGTGGTGGTTCTGGCGGCGGC |
| | | | | GGCTCCGGTGGTGGTGGTTCTGACATCGTGATGACACAGTCTCCAGACTCCCTGACTGTGTCTCT |
| | | | | GGGCGAGAGGACCACCATCAACTGCAAGTCCAGCCAGAGTGTTTTAGACAGCTCCAAGAATAAGA |
| | | | | ACTCCTTAGCTTGGTACCAGCAGAAACCAGGACAGCCTCCTAAATTACTCCTTTCCTGGGCATCT |
| | | | | ACGCGGGAATCCGGGATCCCTGACCGATTCAGTGGCAGCGGGTCTGGGACAGATTTCACTCTCAC |
| | | | | TATTGACAGCCTGCAGCCTGAAGATTCTGCAACTTACTATTGTCAACAGTCTGCCCACTTCCCGA |
| | | | | TCACCTTTGGCCAAGGGACACGACTGGAGATTAAATCCGGAGGTGGTGGCTCCGAGGTGCAGCTG |
| | | | | GTCGAGTCTGGAGGAGGATTGGTGCAGCCTGGAGGGTCATTGAAACTCTCATGTGCAGCCTCTGG |
| | | | | ATTCACCTTCAATAGCTACGCCATGAACTGGGTCCGCCAGGCTCCAGGAAAGGGTTTGGAATGGG |
| | | | | TTGCTCGCATAAGAAGTAAATATAATAATTATGCAACATATTATGCCGATTCAGTGAAAGGCAGG |
| | | | | TTCACCATCTCCAGAGATGATTCAAAAAACACTGCCTATCTACAAATGAACAACTTGAAAACTGA |
| | | | | GGACACTGCCGTGTACTACTGTGTGAGACATGGGAACTTCGGTAATAGCTACGTTTCCTGGTGGG |
| | | | | CTTACTGGGGCCAAGGGACTCTGGTCACCGTCTCCTCAGGTGGTGGTGGTTCTGGCGGCGGCGGC |
| | | | | TCCGGTGGTGGTGGTTCTCAGACTGTTGTGACTCAGGAACCTTCACTCACCGTATCACCTGGTGG |
| | | | | AACAGTCACACTCACTTGTGGCTCCTCGACTGGGGCTGTTACATCTGGCAACTACCCAAACTGGG |
| | | | | TCCAACAAAAACCAGGTCAGGCACCCCGTGGTCTAATAGGTGGGACTAAGTTCCTCGCCCCCGGT |
| | | | | ACTCCTGCCAGATTCTCAGGCTCCCTGCTTGGAGGCAAGGCTGCCCTCACCCTCTCAGGGGTACA |
| | | | | GCCAGAGGATGAGGCAGAATATTACTGTGTTCTATGGTACAGCAACCGCTGGGTGTTCGGTGGAG |
| | | | | GAACCAAACTGACTGTCCTA |
| 267. | CD33 AF5 HL x | artificial | aa | QVQLVQSGAEVKKPGASVKVSCKASGYTFTNYGMNWVKQAPGQGLKWMGWINTYTGEPTYADDFK |
| | I2C HL | | | GRVTMTSDTSTSTAYLELHNLRSDDTAVYYCARWSWSDGYYVYFDYWGQGTTVTVSSggggsggg |
| | | | | gsggggsDIVMTQSPDSLTVSLGERTTINCKSSQSVLDSSKNKNSLAWYQQKPGQPPKLLLSWAS |
| | | | | TRESGIPDRFSGSGSGTDFTLTIDSLQPEDSATYYCQQSAHFPITFGQGTRLEIKSGGGGSEVQL |
| | | | | VESGGGLVQPGGSLKLSCAASGFTFNKYAMNWVRQAPGKGLEWVARIRSKYNNYATYYADSVKDR |
| | | | | FTISRDDSKNTAYLQMNNLKTEDTAVYYCVRHGNFGNSYISYWAYWGQGTLVTVSSGGGGSGGGG |
| | | | | SGGGGSQTVVTQEPSLTVSPGGTVTLTCGSSTGAVTSGNYPNWVQQKPGQAPRGLIGGTKFLAPG |
| | | | | TPARFSGSLLGGKAALTLSGVQPEDEAEYYCVLWYSNRWVFGGGTKLTVL |
| 268. | CD33 AF5 HL x | artificial | nt | CAGGTGCAGCTGGTGCAGTCTGGAGCTGAGGTGAAGAAGCCTGGAGCGTCAGTCAAGGTCTCCTG |
| | I2C HL | | | CAAGGCTAGCGGGTATACCTTCACAAACTATGGAATGAACTGGGTGAAGCAGGCTCCAGGACAGG |
| | | | | GTTTAAAGTGGATGGGCTGGATAAACACCTACACTGGAGAGCCAACATATGCTGATGACTTCAAG |
| | | | | GGACGGGTTACCATGACTTCGGATACCTCTACCAGCACTGCCTATTTGGAACTCCACAACCTCAG |
| | | | | AAGTGATGACACGGCTGTATATTACTGTGCGCGCTGGAGTTGGAGTGATGGTTACTACGTTTACT |
| | | | | TTGACTACTGGGGCCAAGGCACTACGGTCACCGTCTCCTCAGGTGGTGGTGGTTCTGGCGGCGGC |
| | | | | GGCTCCGGTGGTGGTGGTTCTGACATCGTGATGACACAGTCTCCAGACTCCCTGACTGTGTCTCT |
| | | | | GGGCGAGAGGACCACCATCAACTGCAAGTCCAGCCAGAGTGTTTTAGACAGCTCCAAGAATAAGA |
| | | | | ACTCCTTAGCTTGGTACCAGCAGAAACCAGGACAGCCTCCTAAATTACTCCTTTCCTGGGCATCT |
| | | | | ACGCGGGAATCCGGGATCCCTGACCGATTCAGTGGCAGCGGGTCTGGGACAGATTTCACTCTCAC |
| | | | | TATTGACAGCCTGCAGCCTGAAGATTCTGCAACTTACTATTGTCAACAGTCTGCCCACTTCCCGA |
| | | | | TCACCTTTGGCCAAGGGACACGACTGGAGATTAAATCCGGAGGTGGTGGCTCCGAGGTGCAGCTG |
| | | | | GTCGAGTCTGGAGGAGGATTGGTGCAGCCTGGAGGGTCATTGAAACTCTCATGTGCAGCCTCTGG |
| | | | | ATTCACCTTCAATAAGTACGCCATGAACTGGGTCCGCCAGGCTCCAGGAAAGGGTTTGGAATGGG |
| | | | | TTGCTCGCATAAGAAGTAAATATAATAATTATGCAACATATTATGCCGATTCAGTGAAAGACAGG |
| | | | | TTCACCATCTCCAGAGATGATTCAAAAAACACTGCCTATCTACAAATGAACAACTTGAAAACTGA |
| | | | | GGACACTGCCGTGTACTACTGTGTGAGACATGGGAACTTCGGTAATAGCTACATATCCTACTGGG |
| | | | | CTTACTGGGGCCAAGGGACTCTGGTCACCGTCTCCTCAGGTGGTGGTGGTTCTGGCGGCGGCGGC |
| | | | | TCCGGTGGTGGTGGTTCTCAGACTGTTGTGACTCAGGAACCTTCACTCACCGTATCACCTGGTGG |
| | | | | AACAGTCACACTCACTTGTGGCTCCTCGACTGGGGCTGTTACATCTGGCAACTACCCAAACTGGG |
| | | | | TCCAACAAAAACCAGGTCAGGCACCCCGTGGTCTAATAGGTGGGACTAAGTTCCTCGCCCCCGGT |
| | | | | ACTCCTGCCAGATTCTCAGGCTCCCTGCTTGGAGGCAAGGCTGCCCTCACCCTCTCAGGGGTACA |
| | | | | GCCAGAGGATGAGGCAGAATATTACTGTGTTCTATGGTACAGCAACCGCTGGGTGTTCGGTGGAG |
| | | | | GAACCAAACTGACTGTCCTA |
| 269. | CD33 AC8 HL x | artificial | aa | QVQLVQSGAEVKKPGESVKVSCKASGYTFTNYGMNWVKQAPGQGLKWMGWINTYTGEPTYADDFK |
| | H2C HL | | | GRVTMTTDTSTSTAYMEIRNLRNDDTAVYYCARWSWSDGYYVYFDYWGQGTTVTVSSggggsggg |
| | | | | gsggggsDIVMTQSPDSLTVSLGERTTINCKSSQSVLDSSKNKNSLAWYQQKPGQPPKLLLSWAS |
| | | | | TRESGIPDRFSGSGSGTDFTLTIDSLQPEDSATYYCQQSAHFPITFGQGTRLEIKSGGGGSEVQL |
| | | | | VESGGGLVQPGGSLKLSCAASGFTFNKYAMNWVRQAPGKGLEWVARIRSKYNNYATYYADSVKDR |
| | | | | FTISRDDSKNTAYLQMNNLKTEDTAVYYCVRHGNFGNSYISYWAYWGQGTLVTVSSGGGGSGGGG |
| | | | | SGGGGSQTVVTQEPSLTVSPGGTVTLTCGSSTGAVTSGYYPNWVQQKPGQAPRGLIGGTKFLAPG |
| | | | | TPARFSGSLLGGKAALTLSGVQPEDEAEYYCALWYSNRWVFGGGTKLTVL |
| 270. | CD33 AC8 HL x | artificial | nt | CAGGTGCAGCTGGTGCAGTCTGGAGCTGAGGTGAAGAAGCCTGGAGAGTCAGTCAAGGTCTCCTG |
| | H2C HL | | | CAAGGCTAGCGGGTATACCTTCACAAACTATGGAATGAACTGGGTGAAGCAGGCTCCAGGACAGG |
| | | | | GTTTAAAGTGGATGGGCTGGATAAACACCTACACTGGAGAGCCAACATATGCTGATGACTTCAAG |
| | | | | GGACGGGTTACCATGACTACGGATACCTCTACCAGCACTGCCTATATGGAAATCCGCAACCTCAG |
| | | | | AAATGATGACACGGCTGTATATTACTGTGCGCGCTGGAGTTGGAGTGATGGTTACTACGTTTACT |
| | | | | TTGACTACTGGGGCCAAGGCACTACGGTCACCGTCTCCTCAGGTGGTGGTGGTTCTGGCGGCGGC |
| | | | | GGCTCCGGTGGTGGTGGTTCTGACATCGTGATGACACAGTCTCCAGACTCCCTGACTGTGTCTCT |
| | | | | GGGCGAGAGGACCACCATCAACTGCAAGTCCAGCCAGAGTGTTTTAGACAGCTCCAAGAATAAGA |
| | | | | ACTCCTTAGCTTGGTACCAGCAGAAACCAGGACAGCCTCCTAAATTACTCCTTTCCTGGGCATCT |
| | | | | ACGCGGGAATCCGGGATCCCTGACCGATTCAGTGGCAGCGGGTCTGGGACAGATTTCACTCTCAC |
| | | | | TATTGACAGCCTGCAGCCTGAAGATTCTGCAACTTACTATTGTCAACAGTCTGCCCACTTCCCGA |
| | | | | TCACCTTTGGCCAAGGGACACGACTGGAGATTAAATCCGGAGGTGGTGGCTCCGAGGTGCAGCTG |
| | | | | GTCGAGTCTGGAGGAGGATTGGTGCAGCCTGGAGGGTCATTGAAACTCTCATGTGCAGCCTCTGG |
| | | | | ATTCACCTTCAATAAGTACGCCATGAACTGGGTCCGCCAGGCTCCAGGAAAGGGTTTGGAATGGG |
| | | | | TTGCTCGCATAAGAAGTAAATATAATAATTATGCAACATATTATGCCGATTCAGTGAAAGACAGG |
| | | | | TTCACCATCTCCAGAGATGATTCAAAAAACACTGCCTATCTACAAATGAACAACTTGAAAACTGA |
| | | | | GGACACTGCCGTGTACTACTGTGTGAGACATGGGAACTTCGGTAATAGCTACATATCCTACTGGG |
| | | | | CTTACTGGGGCCAAGGGACTCTGGTCACCGTCTCCTCAGGTGGTGGTGGTTCTGGCGGCGGCGGC |
| | | | | TCCGGTGGTGGTGGTTCTCAGACTGTTGTGACTCAGGAACCTTCACTCACCGTATCACCTGGTGG |
| | | | | AACAGTCACACTCACTTGTGGCTCCTCGACTGGGGCTGTTACATCTGGCTACTACCCAAACTGGG |
| | | | | TCCAACAAAAACCAGGTCAGGCACCCCGTGGTCTAATAGGTGGGACTAAGTTCCTCGCCCCCGGT |
| | | | | ACTCCTGCCAGATTCTCAGGCTCCCTGCTTGGAGGCAAGGCTGCCCTCACCCTCTCAGGGCTACA |
| | | | | GCCAGAGGATGAGGCAGAATATTACTGTGCTCTATGGTACAGCAACCGCTGGGTGTTCGGTGGAG |
| | | | | GAACCAAACTGACTGTCCTA |
| 271. | CD33 AC8 HL x | artificial | aa | QVQLVQSGAEVKKPGESVKVSCKASGYTFTNYGMNWVKQAPGQGLKWMGWINTYTGEPTYADDFK |
| | F12Q HL | | | GRVTMTTDTSTSTAYMEIRNLRNDDTAVYYCARWSWSDGYYVYFDYWGQGTTVTVSSggggsggg |
| | | | | gsggggsDIVMTQSPDSLTVSLGERTTINCKSSQSVLDSSKNKNSLAWYQQKPGQPPKLLLSWAS |
| | | | | TRESGIPDRFSGSGSGTDFTLTIDSLQPEDSATYYCQQSAHFPITFGQGTRLEIKSGGGGSEVQL |
| | | | | VESGGGLVQPGGSLKLSCAASGFTFNSYAMNWVRQAPGKGLEWVARIRSKYNNYATYYADSVKGR |
| | | | | FTISRDDSKNTAYLQMNNLKTEDTAVYYCVRHGNFGNSYVSWWAYWGQGTLVTVSSGGGGSGGGG |
| | | | | SGGGGSQTVVTQEPSLTVSPGGTVTLTCGSSTGAVTSGNYPNWVQQKPGQAPRGLIGGTKFLAPG |
| | | | | TPARFSGSLLGGKAALTLSGVQPEDEAEYYCVLWYSNRWVFGGGTKLTVL |
| 272. | CD33 AC8 HL x | artificial | nt | CAGGTGCAGCTGGTGCAGTCTGGAGCTGAGGTGAAGAAGCCTGGAGAGTCAGTCAAGGTCTCCTG |
| | F12Q HL | | | CAAGGCTAGCGGGTATACCTTCACAAACTATGGAATGAACTGGGTGAAGCAGGCTCCAGGACAGG |
| | | | | GTTTAAAGTGGATGGGCTGGATAAACACCTACACTGGAGAGCCAACATATGCTGATGACTTCAAG |
| | | | | GGACGGGTTACCATGACTACGGATACCTCTACCAGCACTGCCTATATGGAAATCCGCAACCTCAG |
| | | | | AAATGATGACACGGCTGTATATTACTGTGCGCGCTGGAGTTGGAGTGATGGTTACTACGTTTACT |
| | | | | TTGACTACTGGGGCCAAGGCACTACGGTCACCGTCTCCTCAGGTGGTGGTGGTTCTGGCGGCGGC |
| | | | | GGCTCCGGTGGTGGTGGTTCTGACATCGTGATGACACAGTCTCCAGACTCCCTGACTGTGTCTCT |
| | | | | GGGCGAGAGGACCACCATCAACTGCAAGTCCAGCCAGAGTGTTTTAGACAGCTCCAAGAATAAGA |
| | | | | ACTCCTTAGCTTGGTACCAGCAGAAACCAGGACAGCCTCCTAAATTACTCCTTTCCTGGGCATCT |
| | | | | ACGCGGGAATCCGGGATCCCTGACCGATTCAGTGGCAGCGGGTCTGGGACAGATTTCACTCTCAC |
| | | | | TATTGACAGCCTGCAGCCTGAAGATTCTGCAACTTACTATTGTCAACAGTCTGCCCACTTCCCGA |
| | | | | TCACCTTTGGCCAAGGGACACGACTGGAGATTAAATCCGGAGGTGGTGGCTCCGAGGTGCAGCTG |
| | | | | GTCGAGTCTGGAGGAGGATTGGTGCAGCCTGGAGGGTCATTGAAACTCTCATGTGCAGCCTCTGG |
| | | | | ATTCACCTTCAATAGCTACGCCATGAACTGGGTCCGCCAGGCTCCAGGAAAGGGTTTGGAATGGG |
| | | | | TTGCTCGCATAAGAAGTAAATATAATAATTATGCAACATATTATGCCGATTCAGTGAAAGGCAGG |
| | | | | TTCACCATCTCCAGAGATGATTCAAAAAACACTGCCTATCTACAAATGAACAACTTGAAAACTGA |
| | | | | GGACACTGCCGTGTACTACTGTGTGAGACATGGGAACTTCGGTAATAGCTACGTTTCCTGGTGGG |
| | | | | CTTACTGGGGCCAAGGGACTCTGGTCACCGTCTCCTCAGGTGGTGGTGGTTCTGGCGGCGGCGGC |
| | | | | TCCGGTGGTGGTGGTTCTCAGACTGTTGTGACTCAGGAACCTTCACTCACCGTATCACCTGGTGG |
| | | | | AACAGTCACACTCACTTGTGGCTCCTCGACTGGGGCTGTTACATCTGGCAACTACCCAAACTGGG |
| | | | | TCCAACAAAAACCAGGTCAGGCACCCCGTGGTCTAATAGGTGGGACTAAGTTCCTCGCCCCCGGT |
| | | | | ACTCCTGCCAGATTCTCAGGCTCCCTGCTTGGAGGCAAGGCTGCCCTCACCCTCTCAGGGGTACA |
| | | | | GCCAGAGGATGAGGCAGAATATTACTGTGTTCTATGGTACAGCAACCGCTGGGTGTTCGGTGGAG |
| | | | | GAACCAAACTGACTGTCCTA |
| 273. | CD33 AC8 HL x | artificial | aa | QVQLVQSGAEVKKPGESVKVSCKASGYTFTNYGMNWVKQAPGQGLKWMGWINTYTGEPTYADDFK |
| | I2C HL | | | GRVTMTTDTSTSTAYMEIRNLRNDDTAVYYCARWSWSDGYYVYFDYWGQGTTVTVSSggggsggg |
| | | | | gsggggsDIVMTQSPDSLTVSLGERTTINCKSSQSVLDSSKNKNSLAWYQQKPGQPPKLLLSWAS |
| | | | | TRESGIPDRFSGSGSGTDFTLTIDSLQPEDSATYYCQQSAHFPITFGQGTRLEIKSGGGGSEVQL |
| | | | | VESGGGLVQPGGSLKLSCAASGFTFNKYAMNWVRQAPGKGLEWVARIRSKYNNYATYYADSVKDR |
| | | | | FTISRDDSKNTAYLQMNNLKTEDTAVYYCVRHGNFGNSYISYWAYWGQGTLVTVSSGGGGSGGGG |
| | | | | SGGGGSQTVVTQEPSLTVSPGGTVTLTCGSSTGAVTSGNYPNWVQQKPGQAPRGLIGGTKFLAPG |
| | | | | TPARFSGSLLGGKAALTLSGVQPEDEAEYYCVLWYSNRWVFGGGTKLTVL |
| 274. | CD33 AC8 HL x | artificial | nt | CAGGTGCAGCTGGTGCAGTCTGGAGCTGAGGTGAAGAAGCCTGGAGAGTCAGTCAAGGTCTCCTG |
| | I2C HL | | | CAAGGCTAGCGGGTATACCTTCACAAACTATGGAATGAACTGGGTGAAGCAGGCTCCAGGACAGG |
| | | | | GTTTAAAGTGGATGGGCTGGATAAACACCTACACTGGAGAGCCAACATATGCTGATGACTTCAAG |
| | | | | GGACGGGTTACCATGACTACGGATACCTCTACCAGCACTGCCTATATGGAAATCCGCAACCTCAG |
| | | | | AAATGATGACACGGCTGTATATTACTGTGCGCGCTGGAGTTGGAGTGATGGTTACTACGTTTACT |
| | | | | TTGACTACTGGGGCCAAGGCACTACGGTCACCGTCTCCTCAGGTGGTGGTGGTTCTGGCGGCGGC |
| | | | | GGCTCCGGTGGTGGTGGTTCTGACATCGTGATGACACAGTCTCCAGACTCCCTGACTGTGTCTCT |
| | | | | GGGCGAGAGGACCACCATCAACTGCAAGTCCAGCCAGAGTGTTTTAGACAGCTCCAAGAATAAGA |
| | | | | ACTCCTTAGCTTGGTACCAGCAGAAACCAGGACAGCCTCCTAAATTACTCCTTTCCTGGGCATCT |
| | | | | ACGCGGGAATCCGGGATCCCTGACCGATTCAGTGGCAGCGGGTCTGGGACAGATTTCACTCTCAC |
| | | | | TATTGACAGCCTGCAGCCTGAAGATTCTGCAACTTACTATTGTCAACAGTCTGCCCACTTCCCGA |
| | | | | TCACCTTTGGCCAAGGGACACGACTGGAGATTAAATCCGGAGGTGGTGGCTCCGAGGTGCAGCTG |
| | | | | GTCGAGTCTGGAGGAGGATTGGTGCAGCCTGGAGGGTCATTGAAACTCTCATGTGCAGCCTCTGG |
| | | | | ATTCACCTTCAATAAGTACGCCATGAACTGGGTCCGCCAGGCTCCAGGAAAGGGTTTGGAATGGG |
| | | | | TTGCTCGCATAAGAAGTAAATATAATAATTATGCAACATATTATGCCGATTCAGTGAAAGACAGG |
| | | | | TTCACCATCTCCAGAGATGATTCAAAAAACACTGCCTATCTACAAATGAACAACTTGAAAACTGA |
| | | | | GGACACTGCCGTGTACTACTGTGTGAGACATGGGAACTTCGGTAATAGCTACATATCCTACTGGG |
| | | | | CTTACTGGGGCCAAGGGACTCTGGTCACCGTCTCCTCAGGTGGTGGTGGTTCTGGCGGCGGCGGC |
| | | | | TCCGGTGGTGGTGGTTCTCAGACTGTTGTGACTCAGGAACCTTCACTCACCGTATCACCTGGTGG |
| | | | | AACAGTCACACTCACTTGTGGCTCCTCGACTGGGGCTGTTACATCTGGCAACTACCCAAACTGGG |
| | | | | TCCAACAAAAACCAGGTCAGGCACCCCGTGGTCTAATAGGTGGGACTAAGTTCCTCGCCCCCGGT |
| | | | | ACTCCTGCCAGATTCTCAGGCTCCCTGCTTGGAGGCAAGGCTGCCCTCACCCTCTCAGGGGTACA |
| | | | | GCCAGAGGATGAGGCAGAATATTACTGTGTTCTATGGTACAGCAACCGCTGGGTGTTCGGTGGAG |
| | | | | GAACCAAACTGACTGTCCTA |
| 275. | CD33 AH11 HL x | artificial | aa | QVQLVQSGAEVKKPGESVKVSCKASGYTFTNYGMNWVKQAPGQGLKWMGWINTYTGEPTYADDFK |
| | H2C HL | | | GRVTMTSDTSTSTAYMEISSLRSDDTAVYYCARWSWSDGYYVYFDYWGQGTTVTVSSggggsggg |
| | | | | gsggggsDIVMTQSPDSLTVSLGERTTINCKSSQSVLDSSKNKNSLAWYQQKPGQPPKLLLSWAS |
| | | | | TRESGIPDRFSGSGSGTDFTLTIDSLQPEDSATYYCQQSAHFPITFGQGTRLEIKSGGGGSEVQL |
| | | | | VESGGGLVQPGGSLKLSCAASGFTFNKYAMNWVRQAPGKGLEWVARIRSKYNNYATYYADSVKDR |
| | | | | FTISRDDSKNTAYLQMNNLKTEDTAVYYCVRHGNFGNSYISYWAYWGQGTLVTVSSGGGGSGGGG |
| | | | | SGGGGSQTVVTQEPSLTVSPGGTVTLTCGSSTGAVTSGYYPNWVQQKPGQAPRGLIGGTKFLAPG |
| | | | | TPARFSGSLLGGKAALTLSGVQPEDEAEYYCALWYSNRWVFGGGTKLTVL |
| 276. | CD33 AH11 HL x | artificial | nt | CAGGTGCAGCTGGTGCAGTCTGGAGCTGAGGTGAAGAAGCCTGGAGAGTCAGTCAAGGTCTCCTG |
| | H2C HL | | | CAAGGCTAGCGGGTATACCTTCACAAACTATGGAATGAACTGGGTGAAGCAGGCTCCAGGACAGG |
| | | | | GTTTAAAGTGGATGGGCTGGATAAACACCTACACTGGAGAGCCAACATATGCTGATGACTTCAAG |
| | | | | GGACGGGTTACCATGACTTCGGATACCTCTACCAGCACTGCCTATATGGAAATCAGCAGCCTCAG |
| | | | | AAGTGATGACACGGCTGTATATTACTGTGCGCGCTGGAGTTGGAGTGATGGTTACTACGTTTACT |
| | | | | TTGACTACTGGGGCCAAGGCACTACGGTCACCGTCTCCTCAGGTGGTGGTGGTTCTGGCGGCGGC |
| | | | | GGCTCCGGTGGTGGTGGTTCTGACATCGTGATGACACAGTCTCCAGACTCCCTGACTGTGTCTCT |
| | | | | GGGCGAGAGGACCACCATCAACTGCAAGTCCAGCCAGAGTGTTTTAGACAGCTCCAAGAATAAGA |
| | | | | ACTCCTTAGCTTGGTACCAGCAGAAACCAGGACAGCCTCCTAAATTACTCCTTTCCTGGGCATCT |
| | | | | ACGCGGGAATCCGGGATCCCTGACCGATTCAGTGGCAGCGGGTCTGGGACAGATTTCACTCTCAC |
| | | | | TATTGACAGCCTGCAGCCTGAAGATTCTGCAACTTACTATTGTCAACAGTCTGCCCACTTCCCGA |
| | | | | TCACCTTTGGCCAAGGGACACGACTGGAGATTAAATCCGGAGGTGGTGGCTCCGAGGTGCAGCTG |
| | | | | GTCGAGTCTGGAGGAGGATTGGTGCAGCCTGGAGGGTCATTGAAACTCTCATGTGCAGCCTCTGG |
| | | | | ATTCACCTTCAATAAGTACGCCATGAACTGGGTCCGCCAGGCTCCAGGAAAGGGTTTGGAATGGG |
| | | | | TTGCTCGCATAAGAAGTAAATATAATAATTATGCAACATATTATGCCGATTCAGTGAAAGACAGG |
| | | | | TTCACCATCTCCAGAGATGATTCAAAAAACACTGCCTATCTACAAATGAACAACTTGAAAACTGA |
| | | | | GGACACTGCCGTGTACTACTGTGTGAGACATGGGAACTTCGGTAATAGCTACATATCCTACTGGG |
| | | | | CTTACTGGGGCCAAGGGACTCTGGTCACCGTCTCCTCAGGTGGTGGTGGTTCTGGCGGCGGCGGC |
| | | | | TCCGGTGGTGGTGGTTCTCAGACTGTTGTGACTCAGGAACCTTCACTCACCGTATCACCTGGTGG |
| | | | | AACAGTCACACTCACTTGTGGCTCCTCGACTGGGGCTGTTACATCTGGCTACTACCCAAACTGGG |
| | | | | TCCAACAAAAACCAGGTCAGGCACCCCGTGGTCTAATAGGTGGGACTAAGTTCCTCGCCCCCGGT |
| | | | | ACTCCTGCCAGATTCTCAGGCTCCCTGCTTGGAGGCAAGGCTGCCCTCACCCTCTCAGGGGTACA |
| | | | | GCCAGAGGATGAGGCAGAATATTACTGTGCTCTATGGTACAGCAACCGCTGGGTGTTCGGTGGAG |
| | | | | GAACCAAACTGACTGTCCTA |
| 277. | CD33 AH11 HL × | artificial | aa | QVQLVQSGAEVKKPGESVKVSCKASGYTFTNYGMNWVKQAPGQGLKWMGWINTYTGEPTYADDFK |
| | F12Q HL | | | GRVTMTSDTSTSTAYMEISSLRSDDTAVYYCARWSWSDGYYVYFDYWGQGTTVTVSSggggsggg |
| | | | | gsggggsDIVMTQSPDSLTVSLGERTTINCKSSQSVLDSSKNKNSLAWYQQKPGQPPKLLLSWAS |
| | | | | TRESGIPDRFSGSGSGTDFTLTIDSLQPEDSATYYCQQSAHFPITFGQGTRLEIKSGGGGSEVQL |
| | | | | VESGGGLVQPGGSLKLSCAASGFTFNSYAMNWVRQAPGKGLEWVARIRSKYNNYATYYADSVKGR |
| | | | | FTISRDDSKNTAYLQMNNLKTEDTAVYYCVRHGNFGNSYVSWWAYWGQGTLVTVSSGGGGSGGGG |
| | | | | SGGGGSQTVVTQEPSLTVSPGGTVTLTCGSSTGAVTSGNYPNWVQQKPGQAPRGLIGGTKFLAPG |
| | | | | TPARFSGSLLGGKAALTLSGVQPEDEAEYYCVLWYSNRWVFGGGTKLTVL |
| 278. | CD33 AH11 HL × | artificial | nt | CAGGTGCAGCTGGTGCAGTCTGGAGCTGAGGTGAAGAAGCCTGGAGAGTCAGTCAAGGTCTCCTG |
| | F12Q HL | | | CAAGGCTAGCGGGTATACCTTCACAAACTATGGAATGAACTGGGTGAAGCAGGCTCCAGGACAGG |
| | | | | GTTTAAAGTGGATGGGCTGGATAAACACCTACACTGGAGAGCCAACATATGCTGATGACTTCAAG |
| | | | | GGACGGGTTACCATGACTTCGGATACCTCTACCAGCACTGCCTATATGGAAATCAGCAGCCTCAG |
| | | | | AAGTGATGACACGGCTGTATATTACTGTGCGCGCTGGAGTTGGAGTGATGGTTACTACGTTTACT |
| | | | | TTGACTACTGGGGCCAAGGCACTACGGTCACCGTCTCCTCAGGTGGTGGTGGTTCTGGCGGCGGC |
| | | | | GGCTCCGGTGGTGGTGGTTCTGACATCGTGATGACACAGTCTCCAGACTCCCTGACTGTGTCTCT |
| | | | | GGGCGAGAGGACCACCATCAACTGCAAGTCCAGCCAGAGTGTTTTAGACAGCTCCAAGAATAAGA |
| | | | | ACTCCTTAGCTTGGTACCAGCAGAAACCAGGACAGCCTCCTAAATTACTCCTTTCCTGGGCATCT |
| | | | | ACGCGGGAATCCGGGATCCCTGACCGATTCAGTGGCAGCGGGTCTGGGACAGATTTCACTCTCAC |
| | | | | TATTGACAGCCTGCAGCCTGAAGATTCTGCAACTTACTATTGTCAACAGTCTGCCCACTTCCCGA |
| | | | | TCACCTTTGGCCAAGGGACACGACTGGAGATTAAATCCGGAGGTGGTGGCTCCGAGGTGCAGCTG |
| | | | | GTCGAGTCTGGAGGAGGATTGGTGCAGCCTGGAGGGTCATTGAAACTCTCATGTGCAGCCTCTGG |
| | | | | ATTCACCTTCAATAGCTACGCCATGAACTGGGTCCGCCAGGCTCCAGGAAAGGGTTTGGAATGGG |
| | | | | TTGCTCGCATAAGAAGTAAATATAATAATTATGCAACATATTATGCCGATTCAGTGAAAGGCAGG |
| | | | | TTCACCATCTCCAGAGATGATTCAAAAAACACTGCCTATCTACAAATGAACAACTTGAAAACTGA |
| | | | | GGACACTGCCGTGTACTACTGTGTGAGACATGGGAACTTCGGTAATAGCTACGTTTCCTGGTGGG |
| | | | | CTTACTGGGGCCAAGGGACTCTGGTCACCGTCTCCTCAGGTGGTGGTGGTTCTGGCGGCGGCGGC |
| | | | | TCCGGTGGTGGTGGTTCTCAGACTGTTGTGACTCAGGAACCTTCACTCACCGTATCACCTGGTGG |
| | | | | AACAGTCACACTCACTTGTGGCTCCTCGACTGGGGCTGTTACATCTGGCAACTACCCAAACTGGG |
| | | | | TCCAACAAAAACCAGGTCAGGCACCCCGTGGTCTAATAGGTGGGACTAAGTTCCTCGCCCCCGGT |
| | | | | ACTCCTGCCAGATTCTCAGGCTCCCTGCTTGGAGGCAAGGCTGCCCTCACCCTCTCAGGGGTACA |
| | | | | GCCAGAGGATGAGGCAGAATATTACTGTGTTCTATGGTACAGCAACCGCTGGGTGTTCGGTGGAG |
| | | | | GAACCAAACTGACTGTCCTA |
| 279. | CD33 AH11 HL x | artificial | aa | QVQLVQSGAEVKKPGESVKVSCKASGYTFTNYGMNWVKQAPGQGLKWMGWINTYTGEPTYADDFK |
| | I2C HL | | | GRVTMTSDTSTSTAYMEISSLRSDDTAVYYCARWSWSDGYYVYFDYWGQGTTVTVSSggggsggg |
| | | | | gsggggsDIVMTQSPDSLTVSLGERTTINCKSSQSVLDSSKNKNSLAWYQQKPGQPPKLLLSWAS |
| | | | | TRESGIPDRFSGSGSGTDFTLTIDSLQPEDSATYYCQQSAHFPITFGQGTRLEIKSGGGGSEVQL |
| | | | | VESGGGLVQPGGSLKLSCAASGFTFNKYAMNWVRQAPGKGLEWVARIRSKYNNYATYYADSVKDR |
| | | | | FTISRDDSKNTAYLQMNNLKTEDTAVYYCVRHGNFGNSYISYWAYWGQGTLVTVSSGGGGSGGGG |
| | | | | SGGGGSQTVVTQEPSLTVSPGGTVTLTCGSSTGAVTSGNYPNWVQQKPGQAPRGLIGGTKFLAPG |
| | | | | TPARFSGSLLGGKAALTLSGVQPEDEAEYYCVLWYSNRWVFGGGTKLTVL |
| 280. | CD33 AH11 HL x | artificial | nt | CAGGTGCAGCTGGTGCAGTCTGGAGCTGAGGTGAAGAAGCCTGGAGAGTCAGTCAAGGTCTCCTG |
| | I2C HL | | | CAAGGCTAGCGGGTATACCTTCACAAACTATGGAATGAACTGGGTGAAGCAGGCTCCAGGACAGG |
| | | | | GTTTAAAGTGGATGGGCTGGATAAACACCTACACTGGAGAGCCAACATATGCTGATGACTTCAAG |
| | | | | GGACGGGTTACCATGACTTCGGATACCTCTACCAGCACTGCCTATATGGAAATCAGCAGCCTCAG |
| | | | | AAGTGATGACACGGCTGTATATTACTGTGCGCGCTGGAGTTGGAGTGATGGTTACTACGTTTACT |
| | | | | TTGACTACTGGGGCCAAGGCACTACGGTCACCGTCTCCTCAGGTGGTGGTGGTTCTGGCGGCGGC |
| | | | | GGCTCCGGTGGTGGTGGTTCTGACATCGTGATGACACAGTCTCCAGACTCCCTGACTGTGTCTCT |
| | | | | GGGCGAGAGGACCACCATCAACTGCAAGTCCAGCCAGAGTGTTTTAGACAGCTCCAAGAATAAGA |
| | | | | ACTCCTTAGCTTGGTACCAGCAGAAACCAGGACAGCCTCCTAAATTACTCCTTTCCTGGGCATCT |
| | | | | ACGCGGGAATCCGGGATCCCTGACCGATTCAGTGGCAGCGGGTCTGGGACAGATTTCACTCTCAC |
| | | | | TATTGACAGCCTGCAGCCTGAAGATTCTGCAACTTACTATTGTCAACAGTCTGCCCACTTCCCGA |
| | | | | TCACCTTTGGCCAAGGGACACGACTGGAGATTAAATCCGGAGGTGGTGGCTCCGAGGTGCAGCTG |
| | | | | GTCGAGTCTGGAGGAGGATTGGTGCAGCCTGGAGGGTCATTGAAACTCTCATGTGCAGCCTCTGG |
| | | | | ATTCACCTTCAATAAGTACGCCATGAACTGGGTCCGCCAGGCTCCAGGAAAGGGTTTGGAATGGG |
| | | | | TTGCTCGCATAAGAAGTAAATATAATAATTATGCAACATATTATGCCGATTCAGTGAAAGACAGG |
| | | | | TTCACCATCTCCAGAGATGATTCAAAAAACACTGCCTATCTACAAATGAACAACTTGAAAACTGA |
| | | | | GGACACTGCCGTGTACTACTGTGTGAGACATGGGAACTTCGGTAATAGCTACATATCCTACTGGG |
| | | | | CTTACTGGGGCCAAGGGACTCTGGTCACCGTCTCCTCAGGTGGTGGTGGTTCTGGCGGCGGCGGC |
| | | | | TCCGGTGGTGGTGGTTCTCAGACTGTTGTGACTCAGGAACCTTCACTCACCGTATCACCTGGTGG |
| | | | | AACAGTCACACTCACTTGTGGCTCCTCGACTGGGGCTGTTACATCTGGCAACTACCCAAACTGGG |
| | | | | TCCAACAAAAACCAGGTCAGGCACCCCGTGGTCTAATAGGTGGGACTAAGTTCCTCGCCCCCGGT |
| | | | | ACTCCTGCCAGATTCTCAGGCTCCCTGCTTGGAGGCAAGGCTGCCCTCACCCTCTCAGGGGTACA |
| | | | | GCCAGAGGATGAGGCAGAATATTACTGTGTTCTATGGTACAGCAACCGCTGGGTGTTCGGTGGAG |
| | | | | GAACCAAACTGACTGTCCTA |
| 281. | CD33 B3 HL x | artificial | aa | QVQLVQSGAEVKKPGESVKVSCKASGYTFTNYGMNWVKQAPGQGLEWMGWINTYTGETNYADKFQ |
| | H2C HL | | | GRVTFTSDTSTSTAYMELRNLKSDDTAVYYCARWSWSDGYYVYFDYWGQGTTVTVSSggggsggg |
| | | | | gsggggsDIVMTQSPDSMTVSLGERTTINCKSSQSVLDSSTNKNSLAWYQQKPGQPPKLLLSWAS |
| | | | | TRESGIPDRFSGSGSGTDFTLTIDSLQPEDSATYYCQQSAHFPITFGQGTRLDIKSGGGGSEVQL |
| | | | | VESGGGLVQPGGSLKLSCAASGFTFNKYAMNWVRQAPGKGLEWVARIRSKYNNYATYYADSVKDR |
| | | | | FTISRDDSKNTAYLQMNNLKTEDTAVYYCVRHGNFGNSYISYWAYWGQGTLVTVSSGGGGSGGGG |
| | | | | SGGGGSQTVVTQEPSLTVSPGGTVTLTCGSSTGAVTSGYYPNWVQQKPGQAPRGLIGGTKFLAPG |
| | | | | TPARFSGSLLGGKAALTLSGVQPEDEAEYYCALWYSNRWVFGGGTKLTVL |
| 282. | CD33 B3 HL x | artificial | nt | CAGGTGCAGCTGGTGCAGTCTGGAGCTGAGGTGAAGAAGCCTGGAGAGTCAGTCAAGGTCTCCTG |
| | H2C HL | | | CAAGGCTAGCGGGTATACCTTCACAAACTATGGAATGAACTGGGTGAAGCAGGCTCCAGGACAGG |
| | | | | GTTTAGAGTGGATGGGCTGGATAAACACCTACACTGGAGAGACAAACTATGCTGATAAGTTCCAG |
| | | | | GGACGCGTTACCTTCACTTCGGATACCTCTACCAGCACTGCCTATATGGAACTCCGCAACCTCAA |
| | | | | AAGTGATGACACGGCTGTATATTACTGTGCGCGCTGGAGTTGGAGTGATGGTTACTACGTTTACT |
| | | | | TTGACTACTGGGGCCAAGGCACTACGGTCACCGTCTCCTCAGGTGGTGGTGGTTCTGGCGGCGGC |
| | | | | GGCTCCGGTGGTGGTGGTTCTGACATCGTGATGACACAGTCTCCAGACTCCATGACTGTGTCTCT |
| | | | | GGGCGAGAGGACCACCATCAACTGCAAGTCCAGCCAGAGTGTTTTAGACAGCTCCACGAATAAGA |
| | | | | ACTCCTTAGCTTGGTACCAGCAGAAACCAGGACAGCCTCCTAAATTACTCCTTTCCTGGGCATCT |
| | | | | ACGCGGGAATCCGGGATCCCTGACCGATTCAGTGGCAGCGGGTCTGGGACAGATTTCACTCTCAC |
| | | | | TATTGACAGCCTGCAGCCTGAAGATTCTGCAACTTACTATTGTCAACAGTCTGCCCACTTCCCGA |
| | | | | TCACCTTTGGCCAAGGGACACGACTGGACATTAAATCCGGAGGTGGTGGCTCCGAGGTGCAGCTG |
| | | | | GTCGAGTCTGGAGGAGGATTGGTGCAGCCTGGAGGGTCATTGAAACTCTCATGTGCAGCCTCTGG |
| | | | | ATTCACCTTCAATAAGTACGCCATGAACTGGGTCCGCCAGGCTCCAGGAAAGGGTTTGGAATGGG |
| | | | | TTGCTCGCATAAGAAGTAAATATAATAATTATGCAACATATTATGCCGATTCAGTGAAAGACAGG |
| | | | | TTCACCATCTCCAGAGATGATTCAAAAAACACTGCCTATCTACAAATGAACAACTTGAAAACTGA |
| | | | | GGACACTGCCGTGTACTACTGTGTGAGACATGGGAACTTCGGTAATAGCTACATATCCTACTGGG |
| | | | | CTTACTGGGGCCAAGGGACTCTGGTCACCGTCTCCTCAGGTGGTGGTGGTTCTGGCGGCGGCGGC |
| | | | | TCCGGTGGTGGTGGTTCTCAGACTGTTGTGACTCAGGAACCTTCACTCACCGTATCACCTGGTGG |
| | | | | AACAGTCACACTCACTTGTGGCTCCTCGACTGGGGCTGTTACATCTGGCTACTACCCAAACTGGG |
| | | | | TCCAACAAAAACCAGGTCAGGCACCCCGTGGTCTAATAGGTGGGACTAAGTTCCTCGCCCCCGGT |
| | | | | ACTCCTGCCAGATTCTCAGGCTCCCTGCTTGGAGGCAAGGCTGCCCTCACCCTCTCAGGGGTACA |
| | | | | GCCAGAGGATGAGGCAGAATATTACTGTGCTCTATGGTACAGCAACCGCTGGGTGTTCGGTGGAG |
| | | | | GAACCAAACTGACTGTCCTA |
| 283. | CD33 B3 HL x | artificial | aa | QVQLVQSGAEVKKPGESVKVSCKASGYTFTNYGMNWVKQAPGQGLEWMGWINTYTGETNYADKFQ |
| | F12Q HL | | | GRVTFTSDTSTSTAYMELRNLKSDDTAVYYCARWSWSDGYYVYFDYWGQGTTVTVSSggggsggg |
| | | | | gsggggsDIVMTQSPDSMTVSLGERTTINCKSSQSVLDSSTNKNSLAWYQQKPGQPPKLLLSWAS |
| | | | | TRESGIPDRFSGSGSGTDFTLTIDSLQPEDSATYYCQQSAHFPITFGQGTRLDIKSGGGGSEVQL |
| | | | | VESGGGLVQPGGSLKLSCAASGFTFNSYAMNWVRQAPGKGLEWVARIRSKYNNYATYYADSVKGR |
| | | | | FTISRDDSKNTAYLQMNNLKTEDTAVYYCVRHGNFGNSYVSWWAYWGQGTLVTVSSGGGGSGGGG |
| | | | | SGGGGSQTVVTQEPSLTVSPGGTVTLTCGSSTGAVTSGNYPNWVQQKPGQAPRGLIGGTKFLAPG |
| | | | | TPARFSGSLLGGKAALTLSGVQPEDEAEYYCVLWYSNRWVFGGGTKLTVL |
| 284. | CD33 B3 HL x | artificial | nt | CAGGTGCAGCTGGTGCAGTCTGGAGCTGAGGTGAAGAAGCCTGGAGAGTCAGTCAAGGTCTCCTG |
| | F12Q HL | | | CAAGGCTAGCGGGTATACCTTCACAAACTATGGAATGAACTGGGTGAAGCAGGCTCCAGGACAGG |
| | | | | GTTTAGAGTGGATGGGCTGGATAAACACCTACACTGGAGAGACAAACTATGCTGATAAGTTCCAG |
| | | | | GGACGCGTTACCTTCACTTCGGATACCTCTACCAGCACTGCCTATATGGAACTCCGCAACCTCAA |
| | | | | AAGTGATGACACGGCTGTATATTACTGTGCGCGCTGGAGTTGGAGTGATGGTTACTACGTTTACT |
| | | | | TTGACTACTGGGGCCAAGGCACTACGGTCACCGTCTCCTCAGGTGGTGGTGGTTCTGGCGGCGGC |
| | | | | GGCTCCGGTGGTGGTGGTTCTGACATCGTGATGACACAGTCTCCAGACTCCATGACTGTGTCTCT |
| | | | | GGGCGAGAGGACCACCATCAACTGCAAGTCCAGCCAGAGTGTTTTAGACAGCTCCACGAATAAGA |
| | | | | ACTCCTTAGCTTGGTACCAGCAGAAACCAGGACAGCCTCCTAAATTACTCCTTTCCTGGGCATCT |
| | | | | ACGCGGGAATCCGGGATCCCTGACCGATTCAGTGGCAGCGGGTCTGGGACAGATTTCACTCTCAC |
| | | | | TATTGACAGCCTGCAGCCTGAAGATTCTGCAACTTACTATTGTCAACAGTCTGCCCACTTCCCGA |
| | | | | TCACCTTTGGCCAAGGGACACGACTGGACATTAAATCCGGAGGTGGTGGCTCCGAGGTGCAGCTG |
| | | | | GTCGAGTCTGGAGGAGGATTGGTGCAGCCTGGAGGGTCATTGAAACTCTCATGTGCAGCCTCTGG |
| | | | | ATTCACCTTCAATAGCTACGCCATGAACTGGGTCCGCCAGGCTCCAGGAAAGGGTTTGGAATGGG |
| | | | | TTGCTCGCATAAGAAGTAAATATAATAATTATGCAACATATTATGCCGATTCAGTGAAAGGCAGG |
| | | | | TTCACCATCTCCAGAGATGATTCAAAAAACACTGCCTATCTACAAATGAACAACTTGAAAACTGA |
| | | | | GGACACTGCCGTGTACTACTGTGTGAGACATGGGAACTTCGGTAATAGCTACGTTTCCTGGTGGG |
| | | | | CTTACTGGGGCCAAGGGACTCTGGTCACCGTCTCCTCAGGTGGTGGTGGTTCTGGCGGCGGCGGC |
| | | | | TCCGGTGGTGGTGGTTCTCAGACTGTTGTGACTCAGGAACCTTCACTCACCGTATCACCTGGTGG |
| | | | | AACAGTCACACTCACTTGTGGCTCCTCGACTGGGGCTGTTACATCTGGCAACTACCCAAACTGGG |
| | | | | TCCAACAAAAACCAGGTCAGGCACCCCGTGGTCTAATAGGTGGGACTAAGTTCCTCGCCCCCGGT |
| | | | | ACTCCTGCCAGATTCTCAGGCTCCCTGCTTGGAGGCAAGGCTGCCCTCACCCTCTCAGGGGTACA |
| | | | | GCCAGAGGATGAGGCAGAATATTACTGTGTTCTATGGTACAGCAACCGCTGGGTGTTCGGTGGAG |
| | | | | GAACCAAACTGACTGTCCTA |
| 285. | CD33 B3 | artificial | aa | QVQLVQSGAEVKKPGESVKVSCKASGYTFTNYGMNWVKQAPGQGLEWMGWINTYTGETNYADKFQ |
| | HL x I2C HL | | | GRVTFTSDTSTSTAYMELRNLKSDDTAVYYCARWSWSDGYYVYFDYWGQGTTVTVSSggggsggg |
| | | | | gsggggsDIVMTQSPDSMTVSLGERTTINCKSSQSVLDSSTNKNSLAWYQQKPGQPPKLLLSWAS |
| | | | | TRESGIPDRFSGSGSGTDFTLTIDSLQPEDSATYYCQQSAHFPITFGQGTRLDIKSGGGGSEVQL |
| | | | | VESGGGLVQPGGSLKLSCAASGFTFNKYAMNWVRQAPGKGLEWVARIRSKYNNYATYYADSVKDR |
| | | | | FTISRDDSKNTAYLQMNNLKTEDTAVYYCVRHGNFGNSYISYWAYWGQGTLVTVSSGGGGSGGGG |
| | | | | SGGGGSQTVVTQEPSLTVSPGGTVTLTCGSSTGAVTSGNYPNWVQQKPGQAPRGLIGGTKFLAPG |
| | | | | TPARFSGSLLGGKAALTLSGVQPEDEAEYYCVLWYSNRWVFGGGTKLTVL |
| 286. | CD33 B3 | artificial | nt | CAGGTGCAGCTGGTGCAGTCTGGAGCTGAGGTGAAGAAGCCTGGAGAGTCAGTCAAGGTCTCCTG |
| | HL x I2C HL | | | CAAGGCTAGCGGGTATACCTTCACAAACTATGGAATGAACTGGGTGAAGCAGGCTCCAGGACAGG |
| | | | | GTTTAGAGTGGATGGGCTGGATAAACACCTACACTGGAGAGACAAACTATGCTGATAAGTTCCAG |
| | | | | GGACGCGTTACCTTCACTTCGGATACCTCTACCAGCACTGCCTATATGGAACTCCGCAACCTCAA |
| | | | | AAGTGATGACACGGCTGTATATTACTGTGCGCGCTGGAGTTGGAGTGATGGTTACTACGTTTACT |
| | | | | TTGACTACTGGGGCCAAGGCACTACGGTCACCGTCTCCTCAGGTGGTGGTGGTTCTGGCGGCGGC |
| | | | | GGCTCCGGTGGTGGTGGTTCTGACATCGTGATGACACAGTCTCCAGACTCCATGACTGTGTCTCT |
| | | | | GGGCGAGAGGACCACCATCAACTGCAAGTCCAGCCAGAGTGTTTTAGACAGCTCCACGAATAAGA |
| | | | | ACTCCTTAGCTTGGTACCAGCAGAAACCAGGACAGCCTCCTAAATTACTCCTTTCCTGGGCATCT |
| | | | | ACGCGGGAATCCGGGATCCCTGACCGATTCAGTGGCAGCGGGTCTGGGACAGATTTCACTCTCAC |
| | | | | TATTGACAGCCTGCAGCCTGAAGATTCTGCAACTTACTATTGTCAACAGTCTGCCCACTTCCCGA |
| | | | | TCACCTTTGGCCAAGGGACACGACTGGACATTAAATCCGGAGGTGGTGGCTCCGAGGTGCAGCTG |
| | | | | GTCGAGTCTGGAGGAGGATTGGTGCAGCCTGGAGGGTCATTGAAACTCTCATGTGCAGCCTCTGG |
| | | | | ATTCACCTTCAATAAGTACGCCATGAACTGGGTCCGCCAGGCTCCAGGAAAGGGTTTGGAATGGG |
| | | | | TTGCTCGCATAAGAAGTAAATATAATAATTATGCAACATATTATGCCGATTCAGTGAAAGACAGG |
| | | | | TTCACCATCTCCAGAGATGATTCAAAAAACACTGCCTATCTACAAATGAACAACTTGAAAACTGA |
| | | | | GGACACTGCCGTGTACTACTGTGTGAGACATGGGAACTTCGGTAATAGCTACATATCCTACTGGG |
| | | | | CTTACTGGGGCCAAGGGACTCTGGTCACCGTCTCCTCAGGTGGTGGTGGTTCTGGCGGCGGCGGC |
| | | | | TCCGGTGGTGGTGGTTCTCAGACTGTTGTGACTCAGGAACCTTCACTCACCGTATCACCTGGTGG |
| | | | | AACAGTCACACTCACTTGTGGCTCCTCGACTGGGGCTGTTACATCTGGCAACTACCCAAACTGGG |
| | | | | TCCAACAAAAACCAGGTCAGGCACCCCGTGGTCTAATAGGTGGGACTAAGTTCCTCGCCCCCGGT |
| | | | | ACTCCTGCCAGATTCTCAGGCTCCCTGCTTGGAGGCAAGGCTGCCCTCACCCTCTCAGGGGTACA |
| | | | | GCCAGAGGATGAGGCAGAATATTACTGTGTTCTATGGTACAGCAACCGCTGGGTGTTCGGTGGAG |
| | | | | GAACCAAACTGACTGTCCTA |
| 287. | CD33 F2 HL x | artificial | aa | QVQLVQSGAEVKKPGESVKVSCKASGYTFTNYGMNWVKQAPGQGLEWMGWINTYTGETNYADKFQ |
| | H2C HL | | | GRVTFTSDTSTSTAYMELRNLKSDDTAVYYCARWSWSDGYYVYFDYWGQGTTVTVSSggggsggg |
| | | | | gsggggsDIVMTQSPDSLSVSLGERTTINCKSSQSVLDSSTNKNSLAWYQQKPGQPPKLLLSWAS |
| | | | | TRESGIPDRFSGSGSGTDFTLTIDSLQPEDSATYYCQQSAHFPITFGQGTRLEIKSGGGGSEVQL |
| | | | | VESGGGLVQPGGSLKLSCAASGFTFNKYAMNWVRQAPGKGLEWVARIRSKYNNYATYYADSVKDR |
| | | | | FTISRDDSKNTAYLQMNNLKTEDTAVYYCVRHGNFGNSYISYWAYWGQGTLVTVSSGGGGSGGGG |
| | | | | SGGGGSQTVVTQEPSLTVSPGGTVTLTCGSSTGAVTSGYYPNWVQQKPGQAPRGLIGGTKFLAPG |
| | | | | TPARFSGSLLGGKAALTLSGVQPEDEAEYYCALWYSNRWVFGGGTKLTVL |
| 288. | CD33 F2 HL x | artificial | nt | CAGGTGCAGCTGGTGCAGTCTGGAGCTGAGGTGAAGAAGCCTGGAGAGTCAGTCAAGGTCTCCTG |
| | H2C HL | | | CAAGGCTAGCGGGTATACCTTCACAAACTATGGAATGAACTGGGTGAAGCAGGCTCCAGGACAGG |
| | | | | GTTTAGAGTGGATGGGCTGGATAAACACCTACACTGGAGAGACAAACTATGCTGATAAGTTCCAG |
| | | | | GGACGCGTTACCTTCACTTCGGATACCTCTACCAGCACTGCCTATATGGAACTCCGCAACCTCAA |
| | | | | AAGTGATGACACGGCTGTATATTACTGTGCGCGCTGGAGTTGGAGTGATGGTTACTACGTTTACT |
| | | | | TTGACTACTGGGGCCAAGGCACTACGGTCACCGTCTCCTCAGGTGGTGGTGGTTCTGGCGGCGGC |
| | | | | GGCTCCGGTGGTGGTGGTTCTGACATCGTGATGACACAGTCTCCAGACTCCCTGTCTGTGTCTCT |
| | | | | GGGCGAGAGGACCACCATCAACTGCAAGTCCAGCCAGAGTGTTTTAGACAGCTCCACGAATAAGA |
| | | | | ACTCCTTAGCTTGGTACCAGCAGAAACCAGGACAGCCTCCTAAATTACTCCTTTCCTGGGCATCT |
| | | | | ACGCGGGAATCCGGGATCCCTGACCGATTCAGTGGCAGCGGGTCTGGGACAGATTTCACTCTCAC |
| | | | | TATTGACAGCCTGCAGCCTGAAGATTCTGCAACTTACTATTGTCAACAGTCTGCCCACTTCCCGA |
| | | | | TCACCTTTGGCCAAGGGACACGACTGGAGATTAAATCCGGAGGTGGTGGCTCCGAGGTGCAGCTG |
| | | | | GTCGAGTCTGGAGGAGGATTGGTGCAGCCTGGAGGGTCATTGAAACTCTCATGTGCAGCCTCTGG |
| | | | | ATTCACCTTCAATAAGTACGCCATGAACTGGGTCCGCCAGGCTCCAGGAAAGGGTTTGGAATGGG |
| | | | | TTGCTCGCATAAGAAGTAAATATAATAATTATGCAACATATTATGCCGATTCAGTGAAAGACAGG |
| | | | | TTCACCATCTCCAGAGATGATTCAAAAAACACTGCCTATCTACAAATGAACAACTTGAAAACTGA |
| | | | | GGACACTGCCGTGTACTACTGTGTGAGACATGGGAACTTCGGTAATAGCTACATATCCTACTGGG |
| | | | | CTTACTGGGGCCAAGGGACTCTGGTCACCGTCTCCTCAGGTGGTGGTGGTTCTGGCGGCGGCGGC |
| | | | | TCCGGTGGTGGTGGTTCTCAGACTGTTGTGACTCAGGAACCTTCACTCACCGTATCACCTGGTGG |
| | | | | AACAGTCACACTCACTTGTGGCTCCTCGACTGGGGCTGTTACATCTGGCTACTACCCAAACTGGG |
| | | | | TCCAACAAAAACCAGGTCAGGCACCCCGTGGTCTAATAGGTGGGACTAAGTTCCTCGCCCCCGGT |
| | | | | ACTCCTGCCAGATTCTCAGGCTCCCTGCTTGGAGGCAAGGCTGCCCTCACCCTCTCAGGGGTACA |
| | | | | GCCAGAGGATGAGGCAGAATATTACTGTGCTCTATGGTACAGCAACCGCTGGGTGTTCGGTGGAG |
| | | | | GAACCAAACTGACTGTCCTA |
| 289. | CD33 F2 HL x | artificial | aa | QVQLVQSGAEVKKPGESVKVSCKASGYTFTNYGMNWVKQAPGQGLEWMGWINTYTGETNYADKFQ |
| | F12Q HL | | | GRVTFTSDTSTSTAYMELRNLKSDDTAVYYCARWSWSDGYYVYFDYWGQGTTVTVSSggggsggg |
| | | | | gsggggsDIVMTQSPDSLSVSLGERTTINCKSSQSVLDSSTNKNSLAWYQQKPGQPPKLLLSWAS |
| | | | | TRESGIPDRFSGSGSGTDFTLTIDSLQPEDSATYYCQQSAHFPITFGQGTRLEIKSGGGGSEVQL |
| | | | | VESGGGLVQPGGSLKLSCAASGFTFNSYAMNWVRQAPGKGLEWVARIRSKYNNYATYYADSVKGR |
| | | | | FTISRDDSKNTAYLQMNNLKTEDTAVYYCVRHGNFGNSYVSWWAYWGQGTLVTVSSGGGGSGGGG |
| | | | | SGGGGSQTVVTQEPSLTVSPGGTVTLTCGSSTGAVTSGNYPNWVQQKPGQAPRGLIGGTKFLAPG |
| | | | | TPARFSGSLLGGKAALTLSGVQPEDEAEYYCVLWYSNRWVFGGGTKLTVL |
| 290. | CD33 F2 HL x | artificial | nt | CAGGTGCAGCTGGTGCAGTCTGGAGCTGAGGTGAAGAAGCCTGGAGAGTCAGTCAAGGTCTCCTG |
| | F12Q HL | | | CAAGGCTAGCGGGTATACCTTCACAAACTATGGAATGAACTGGGTGAAGCAGGCTCCAGGACAGG |
| | | | | GTTTAGAGTGGATGGGCTGGATAAACACCTACACTGGAGAGACAAACTATGCTGATAAGTTCCAG |
| | | | | GGACGCGTTACCTTCACTTCGGATACCTCTACCAGCACTGCCTATATGGAACTCCGCAACCTCAA |
| | | | | AAGTGATGACACGGCTGTATATTACTGTGCGCGCTGGAGTTGGAGTGATGGTTACTACGTTTACT |
| | | | | TTGACTACTGGGGCCAAGGCACTACGGTCACCGTCTCCTCAGGTGGTGGTGGTTCTGGCGGCGGC |
| | | | | GGCTCCGGTGGTGGTGGTTCTGACATCGTGATGACACAGTCTCCAGACTCCCTGTCTGTGTCTCT |
| | | | | GGGCGAGAGGACCACCATCAACTGCAAGTCCAGCCAGAGTGTTTTAGACAGCTCCACGAATAAGA |
| | | | | ACTCCTTAGCTTGGTACCAGCAGAAACCAGGACAGCCTCCTAAATTACTCCTTTCCTGGGCATCT |
| | | | | ACGCGGGAATCCGGGATCCCTGACCGATTCAGTGGCAGCGGGTCTGGGACAGATTTCACTCTCAC |
| | | | | TATTGACAGCCTGCAGCCTGAAGATTCTGCAACTTACTATTGTCAACAGTCTGCCCACTTCCCGA |
| | | | | TCACCTTTGGCCAAGGGACACGACTGGAGATTAAATCCGGAGGTGGTGGCTCCGAGGTGCAGCTG |
| | | | | GTCGAGTCTGGAGGAGGATTGGTGCAGCCTGGAGGGTCATTGAAACTCTCATGTGCAGCCTCTGG |
| | | | | ATTCACCTTCAATAGCTACGCCATGAACTGGGTCCGCCAGGCTCCAGGAAAGGGTTTGGAATGGG |
| | | | | TTGCTCGCATAAGAAGTAAATATAATAATTATGCAACATATTATGCCGATTCAGTGAAAGGCAGG |
| | | | | TTCACCATCTCCAGAGATGATTCAAAAAACACTGCCTATCTACAAATGAACAACTTGAAAACTGA |
| | | | | GGACACTGCCGTGTACTACTGTGTGAGACATGGGAACTTCGGTAATAGCTACGTTTCCTGGTGGG |
| | | | | CTTACTGGGGCCAAGGGACTCTGGTCACCGTCTCCTCAGGTGGTGGTGGTTCTGGCGGCGGCGGC |
| | | | | TCCGGTGGTGGTGGTTCTCAGACTGTTGTGACTCAGGAACCTTCACTCACCGTATCACCTGGTGG |
| | | | | AACAGTCACACTCACTTGTGGCTCCTCGACTGGGGCTGTTACATCTGGCAACTACCCAAACTGGG |
| | | | | TCCAACAAAAACCAGGTCAGGCACCCCGTGGTCTAATAGGTGGGACTAAGTTCCTCGCCCCCGGT |
| | | | | ACTCCTGCCAGATTCTCAGGCTCCCTGCTTGGAGGCAAGGCTGCCCTCACCCTCTCAGGGGTACA |
| | | | | GCCAGAGGATGAGGCAGAATATTACTGTGTTCTATGGTACAGCAACCGCTGGGTGTTCGGTGGAG |
| | | | | GAACCAAACTGACTGTCCTA |
| 291. | CD33 F2 | artificial | aa | QVQLVQSGAEVKKPGESVKVSCKASGYTFTNYGMNWVKQAPGQGLEWMGWINTYTGETNYADKFQ |
| | HL x I2C HL | | | GRVTFTSDTSTSTAYMELRNLKSDDTAVYYCARWSWSDGYYVYFDYWGQGTTVTVSSggggsggg |
| | | | | gsggggsDIVMTQSPDSLSVSLGERTTINCKSSQSVLDSSTNKNSLAWYQQKPGQPPKLLLSWAS |
| | | | | TRESGIPDRFSGSGSGTDFTLTIDSLQPEDSATYYCQQSAHFPITFGQGTRLEIKSGGGGSEVQL |
| | | | | VESGGGLVQPGGSLKLSCAASGFTFNKYAMNWVRQAPGKGLEWVARIRSKYNNYATYYADSVKDR |
| | | | | FTISRDDSKNTAYLQMNNLKTEDTAVYYCVRHGNFGNSYISYWAYWGQGTLVTVSSGGGGSGGGG |
| | | | | SGGGGSQTVVTQEPSLTVSPGGTVTLTCGSSTGAVTSGNYPNWVQQKPGQAPRGLIGGTKFLAPG |
| | | | | TPARFSGSLLGGKAALTLSGVQPEDEAEYYCVLWYSNRWVFGGGTKLTVL |
| 292. | CD33 F2 | artificial | nt | CAGGTGCAGCTGGTGCAGTCTGGAGCTGAGGTGAAGAAGCCTGGAGAGTCAGTCAAGGTCTCCTG |
| | HL x I2C HL | | | CAAGGCTAGCGGGTATACCTTCACAAACTATGGAATGAACTGGGTGAAGCAGGCTCCAGGACAGG |
| | | | | GTTTAGAGTGGATGGGCTGGATAAACACCTACACTGGAGAGACAAACTATGCTGATAAGTTCCAG |
| | | | | GGACGCGTTACCTTCACTTCGGATACCTCTACCAGCACTGCCTATATGGAACTCCGCAACCTCAA |
| | | | | AAGTGATGACACGGCTGTATATTACTGTGCGCGCTGGAGTTGGAGTGATGGTTACTACGTTTACT |
| | | | | TTGACTACTGGGGCCAAGGCACTACGGTCACCGTCTCCTCAGGTGGTGGTGGTTCTGGCGGCGGC |
| | | | | GGCTCCGGTGGTGGTGGTTCTGACATCGTGATGACACAGTCTCCAGACTCCCTGTCTGTGTCTCT |
| | | | | GGGCGAGAGGACCACCATCAACTGCAAGTCCAGCCAGAGTGTTTTAGACAGCTCCACGAATAAGA |
| | | | | ACTCCTTAGCTTGGTACCAGCAGAAACCAGGACAGCCTCCTAAATTACTCCTTTCCTGGGCATCT |
| | | | | ACGCGGGAATCCGGGATCCCTGACCGATTCAGTGGCAGCGGGTCTGGGACAGATTTCACTCTCAC |
| | | | | TATTGACAGCCTGCAGCCTGAAGATTCTGCAACTTACTATTGTCAACAGTCTGCCCACTTCCCGA |
| | | | | TCACCTTTGGCCAAGGGACACGACTGGAGATTAAATCCGGAGGTGGTGGCTCCGAGGTGCAGCTG |
| | | | | GTCGAGTCTGGAGGAGGATTGGTGCAGCCTGGAGGGTCATTGAAACTCTCATGTGCAGCCTCTGG |
| | | | | ATTCACCTTCAATAAGTACGCCATGAACTGGGTCCGCCAGGCTCCAGGAAAGGGTTTGGAATGGG |
| | | | | TTGCTCGCATAAGAAGTAAATATAATAATTATGCAACATATTATGCCGATTCAGTGAAAGACAGG |
| | | | | TTCACCATCTCCAGAGATGATTCAAAAAACACTGCCTATCTACAAATGAACAACTTGAAAACTGA |
| | | | | GGACACTGCCGTGTACTACTGTGTGAGACATGGGAACTTCGGTAATAGCTACATATCCTACTGGG |
| | | | | CTTACTGGGGCCAAGGGACTCTGGTCACCGTCTCCTCAGGTGGTGGTGGTTCTGGCGGCGGCGGC |
| | | | | TCCGGTGGTGGTGGTTCTCAGACTGTTGTGACTCAGGAACCTTCACTCACCGTATCACCTGGTGG |
| | | | | AACAGTCACACTCACTTGTGGCTCCTCGACTGGGGCTGTTACATCTGGCAACTACCCAAACTGGG |
| | | | | TCCAACAAAAACCAGGTCAGGCACCCCGTGGTCTAATAGGTGGGACTAAGTTCCTCGCCCCCGGT |
| | | | | ACTCCTGCCAGATTCTCAGGCTCCCTGCTTGGAGGCAAGGCTGCCCTCACCCTCTCAGGGGTACA |
| | | | | GCCAGAGGATGAGGCAGAATATTACTGTGTTCTATGGTACAGCAACCGCTGGGTGTTCGGTGGAG |
| | | | | GAACCAAACTGACTGTCCTA |
| 293. | CD33 B10 | artificial | aa | QVQLVQSGAEVKKPGESVKVSCKASGYTFTNYGMNWVKQAPGQGLEWMGWINTYTGEPTYADKFQ |
| | HL x H2C HL | | | GRVTMTTDTSTSTAYMEIRNLRSDDTAVYYCARWSWSDGYYVYFDYWGQGTTVTVSSggggsggg |
| | | | | gsggggsDIVMTQSPDSLTVSLGERTTINCKSSQSVLDSSNNKNSLAWYQQKPGQPPKLLLSWAS |
| | | | | TRESGIPDRFSGSGSGTDFTLTIDGLQPEDSATYYCQQSAHFPITFGQGTRLEIKSGGGGSEVQL |
| | | | | VESGGGLVQPGGSLKLSCAASGFTFNKYAMNWVRQAPGKGLEWVARIRSKYNNYATYYADSVKDR |
| | | | | FTISRDDSKNTAYLQMNNLKTEDTAVYYCVRHGNFGNSYISYWAYWGQGTLVTVSSGGGGSGGGG |
| | | | | SGGGGSQTVVTQEPSLTVSPGGTVTLTCGSSTGAVTSGYYPNWVQQKPGQAPRGLIGGTKFLAPG |
| | | | | TPARFSGSLLGGKAALTLSGVQPEDEAEYYCALWYSNRWVFGGGTKLTVL |
| 294. | CD33 B10 | artificial | nt | CAGGTGCAGCTGGTGCAGTCTGGAGCTGAGGTGAAGAAGCCTGGTGAGTCAGTCAAGGTCTCCTG |
| | HL x H2C HL | | | CAAGGCTAGCGGGTATACCTTCACAAACTATGGAATGAACTGGGTGAAGCAGGCTCCAGGACAGG |
| | | | | GTTTAGAGTGGATGGGCTGGATAAACACCTACACTGGAGAGCCAACCTATGCTGATAAGTTCCAG |
| | | | | GGACGCGTTACCATGACTACGGATACCTCTACCAGCACTGCCTATATGGAAATCCGCAACCTCAG |
| | | | | AAGTGATGACACGGCTGTATATTACTGTGCGCGCTGGAGTTGGAGTGATGGTTACTACGTTTACT |
| | | | | TTGACTACTGGGGCCAAGGCACTACGGTCACCGTCTCCTCAGGTGGTGGTGGTTCTGGCGGCGGC |
| | | | | GGCTCCGGTGGTGGTGGTTCTGACATCGTGATGACACAGTCTCCAGACTCCCTGACTGTGTCTCT |
| | | | | GGGCGAGAGGACCACCATCAACTGCAAGTCCAGCCAGAGTGTTTTAGACAGCTCCAACAATAAGA |
| | | | | ACTCCTTAGCTTGGTACCAGCAGAAACCAGGACAGCCTCCTAAATTACTCCTTTCCTGGGCATCT |
| | | | | ACGCGGGAATCCGGGATCCCTGACCGATTCAGTGGCAGCGGTTCTGGGACAGATTTCACTCTCAC |
| | | | | TATTGACGGCCTGCAGCCTGAAGATTCTGCAACTTACTATTGTCAACAGTCTGCCCACTTCCCGA |
| | | | | TCACCTTTGGCCAAGGGACACGACTGGAGATTAAATCCGGAGGTGGTGGCTCCGAGGTGCAGCTG |
| | | | | GTCGAGTCTGGAGGAGGATTGGTGCAGCCTGGAGGGTCATTGAAACTCTCATGTGCAGCCTCTGG |
| | | | | ATTCACCTTCAATAAGTACGCCATGAACTGGGTCCGCCAGGCTCCAGGAAAGGGTTTGGAATGGG |
| | | | | TTGCTCGCATAAGAAGTAAATATAATAATTATGCAACATATTATGCCGATTCAGTGAAAGACAGG |
| | | | | TTCACCATCTCCAGAGATGATTCAAAAAACACTGCCTATCTACAAATGAACAACTTGAAAACTGA |
| | | | | GGACACTGCCGTGTACTACTGTGTGAGACATGGGAACTTCGGTAATAGCTACATATCCTACTGGG |
| | | | | CTTACTGGGGCCAAGGGACTCTGGTCACCGTCTCCTCAGGTGGTGGTGGTTCTGGCGGCGGCGGC |
| | | | | TCCGGTGGTGGTGGTTCTCAGACTGTTGTGACTCAGGAACCTTCACTCACCGTATCACCTGGTGG |
| | | | | AACAGTCACACTCACTTGTGGCTCCTCGACTGGGGCTGTTACATCTGGCTACTACCCAAACTGGG |
| | | | | TCCAACAAAAACCAGGTCAGGCACCCCGTGGTCTAATAGGTGGGACTAAGTTCCTCGCCCCCGGT |
| | | | | ACTCCTGCCAGATTCTCAGGCTCCCTGCTTGGAGGCAAGGCTGCCCTCACCCTCTCAGGGGTACA |
| | | | | GCCAGAGGATGAGGCAGAATATTACTGTGCTCTATGGTACAGCAACCGCTGGGTGTTCGGTGGAG |
| | | | | GAACCAAACTGACTGTCCTA |
| 295. | CD33 B10 | artificial | aa | QVQLVQSGAEVKKPGESVKVSCKASGYTFTNYGMNWVKQAPGQGLEWMGWINTYTGEPTYADKFQ |
| | HL x F12Q | | | GRVTMTTDTSTSTAYMEIRNLRSDDTAVYYCARWSWSDGYYVYFDYWGQGTTVTVSSggggsggg |
| | HL | | | gsggggsDIVMTQSPDSLTVSLGERTTINCKSSQSVLDSSNNKNSLAWYQQKPGQPPKLLLSWAS |
| | | | | TRESGIPDRFSGSGSGTDFTLTIDGLQPEDSATYYCQQSAHFPITFGQGTRLEIKSGGGGSEVQL |
| | | | | VESGGGLVQPGGSLKLSCAASGFTFNSYAMNWVRQAPGKGLEWVARIRSKYNNYATYYADSVKGR |
| | | | | FTISRDDSKNTAYLQMNNLKTEDTAVYYCVRHGNFGNSYVSWWAYWGQGTLVTVSSGGGGSGGGG |
| | | | | SGGGGSQTVVTQEPSLTVSPGGTVTLTCGSSTGAVTSGNYPNWVQQKPGQAPRGLIGGTKFLAPG |
| | | | | TPARFSGSLLGGKAALTLSGVQPEDEAEYYCVLWYSNRWVFGGGTKLTVL |
| 296. | CD33 B10 | artificial | nt | CAGGTGCAGCTGGTGCAGTCTGGAGCTGAGGTGAAGAAGCCTGGTGAGTCAGTCAAGGTCTCCTG |
| | HL x F12Q | | | CAAGGCTAGCGGGTATACCTTCACAAACTATGGAATGAACTGGGTGAAGCAGGCTCCAGGACAGG |
| | HL | | | GTTTAGAGTGGATGGGCTGGATAAACACCTACACTGGAGAGCCAACCTATGCTGATAAGTTCCAG |
| | | | | GGACGCGTTACCATGACTACGGATACCTCTACCAGCACTGCCTATATGGAAATCCGCAACCTCAG |
| | | | | AAGTGATGACACGGCTGTATATTACTGTGCGCGCTGGAGTTGGAGTGATGGTTACTACGTTTACT |
| | | | | TTGACTACTGGGGCCAAGGCACTACGGTCACCGTCTCCTCAGGTGGTGGTGGTTCTGGCGGCGGC |
| | | | | GGCTCCGGTGGTGGTGGTTCTGACATCGTGATGACACAGTCTCCAGACTCCCTGACTGTGTCTCT |
| | | | | GGGCGAGAGGACCACCATCAACTGCAAGTCCAGCCAGAGTGTTTTAGACAGCTCCAACAATAAGA |
| | | | | ACTCCTTAGCTTGGTACCAGCAGAAACCAGGACAGCCTCCTAAATTACTCCTTTCCTGGGCATCT |
| | | | | ACGCGGGAATCCGGGATCCCTGACCGATTCAGTGGCAGCGGTTCTGGGACAGATTTCACTCTCAC |
| | | | | TATTGACGGCCTGCAGCCTGAAGATTCTGCAACTTACTATTGTCAACAGTCTGCCCACTTCCCGA |
| | | | | TCACCTTTGGCCAAGGGACACGACTGGAGATTAAATCCGGAGGTGGTGGCTCCGAGGTGCAGCTG |
| | | | | GTCGAGTCTGGAGGAGGATTGGTGCAGCCTGGAGGGTCATTGAAACTCTCATGTGCAGCCTCTGG |
| | | | | ATTCACCTTCAATAGCTACGCCATGAACTGGGTCCGCCAGGCTCCAGGAAAGGGTTTGGAATGGG |
| | | | | TTGCTCGCATAAGAAGTAAATATAATAATTATGCAACATATTATGCCGATTCAGTGAAAGGCAGG |
| | | | | TTCACCATCTCCAGAGATGATTCAAAAAACACTGCCTATCTACAAATGAACAACTTGAAAACTGA |
| | | | | GGACACTGCCGTGTACTACTGTGTGAGACATGGGAACTTCGGTAATAGCTACGTTTCCTGGTGGG |
| | | | | CTTACTGGGGCCAAGGGACTCTGGTCACCGTCTCCTCAGGTGGTGGTGGTTCTGGCGGCGGCGGC |
| | | | | TCCGGTGGTGGTGGTTCTCAGACTGTTGTGACTCAGGAACCTTCACTCACCGTATCACCTGGTGG |
| | | | | AACAGTCACACTCACTTGTGGCTCCTCGACTGGGGCTGTTACATCTGGCAACTACCCAAACTGGG |
| | | | | TCCAACAAAAACCAGGTCAGGCACCCCGTGGTCTAATAGGTGGGACTAAGTTCCTCGCCCCCGGT |
| | | | | ACTCCTGCCAGATTCTCAGGCTCCCTGCTTGGAGGCAAGGCTGCCCTCACCCTCTCAGGGGTACA |
| | | | | GCCAGAGGATGAGGCAGAATATTACTGTGTTCTATGGTACAGCAACCGCTGGGTGTTCGGTGGAG |
| | | | | GAACCAAACTGACTGTCCTA |
| 297. | CD33 B10 | artificial | aa | QVQLVQSGAEVKKPGESVKVSCKASGYTFTNYGMNWVKQAPGQGLEWMGWINTYTGEPTYADKFQ |
| | HL x I2C | | | GRVTMTTDTSTSTAYMEIRNLRSDDTAVYYCARWSWSDGYYVYFDYWGQGTTVTVSSggggsggg |
| | HL | | | gsggggsDIVMTQSPDSLTVSLGERTTINCKSSQSVLDSSNNKNSLAWYQQKPGQPPKLLLSWAS |
| | | | | TRESGIPDRFSGSGSGTDFTLTIDGLQPEDSATYYCQQSAHFPITFGQGTRLEIKSGGGGSEVQL |
| | | | | VESGGGLVQPGGSLKLSCAASGFTFNKYAMNWVRQAPGKGLEWVARIRSKYNNYATYYADSVKDR |
| | | | | FTISRDDSKNTAYLQMNNLKTEDTAVYYCVRHGNFGNSYISYWAYWGQGTLVTVSSGGGGSGGGG |
| | | | | SGGGGSQTVVTQEPSLTVSPGGTVTLTCGSSTGAVTSGNYPNWVQQKPGQAPRGLIGGTKFLAPG |
| | | | | TPARFSGSLLGGKAALTLSGVQPEDEAEYYCVLWYSNRWVFGGGTKLTVL |
| 298. | CD33 B10 | artificial | nt | CAGGTGCAGCTGGTGCAGTCTGGAGCTGAGGTGAAGAAGCCTGGTGAGTCAGTCAAGGTCTCCTG |
| | HL x I2C | | | CAAGGCTAGCGGGTATACCTTCACAAACTATGGAATGAACTGGGTGAAGCAGGCTCCAGGACAGG |
| | HL | | | GTTTAGAGTGGATGGGCTGGATAAACACCTACACTGGAGAGCCAACCTATGCTGATAAGTTCCAG |
| | | | | GGACGCGTTACCATGACTACGGATACCTCTACCAGCACTGCCTATATGGAAATCCGCAACCTCAG |
| | | | | AAGTGATGACACGGCTGTATATTACTGTGCGCGCTGGAGTTGGAGTGATGGTTACTACGTTTACT |
| | | | | TTGACTACTGGGGCCAAGGCACTACGGTCACCGTCTCCTCAGGTGGTGGTGGTTCTGGCGGCGGC |
| | | | | GGCTCCGGTGGTGGTGGTTCTGACATCGTGATGACACAGTCTCCAGACTCCCTGACTGTGTCTCT |
| | | | | GGGCGAGAGGACCACCATCAACTGCAAGTCCAGCCAGAGTGTTTTAGACAGCTCCAACAATAAGA |
| | | | | ACTCCTTAGCTTGGTACCAGCAGAAACCAGGACAGCCTCCTAAATTACTCCTTTCCTGGGCATCT |
| | | | | ACGCGGGAATCCGGGATCCCTGACCGATTCAGTGGCAGCGGTTCTGGGACAGATTTCACTCTCAC |
| | | | | TATTGACGGCCTGCAGCCTGAAGATTCTGCAACTTACTATTGTCAACAGTCTGCCCACTTCCCGA |
| | | | | TCACCTTTGGCCAAGGGACACGACTGGAGATTAAATCCGGAGGTGGTGGCTCCGAGGTGCAGCTG |
| | | | | GTCGAGTCTGGAGGAGGATTGGTGCAGCCTGGAGGGTCATTGAAACTCTCATGTGCAGCCTCTGG |
| | | | | ATTCACCTTCAATAAGTACGCCATGAACTGGGTCCGCCAGGCTCCAGGAAAGGGTTTGGAATGGG |
| | | | | TTGCTCGCATAAGAAGTAAATATAATAATTATGCAACATATTATGCCGATTCAGTGAAAGACAGG |
| | | | | TTCACCATCTCCAGAGATGATTCAAAAAACACTGCCTATCTACAAATGAACAACTTGAAAACTGA |
| | | | | GGACACTGCCGTGTACTACTGTGTGAGACATGGGAACTTCGGTAATAGCTACATATCCTACTGGG |
| | | | | CTTACTGGGGCCAAGGGACTCTGGTCACCGTCTCCTCAGGTGGTGGTGGTTCTGGCGGCGGCGGC |
| | | | | TCCGGTGGTGGTGGTTCTCAGACTGTTGTGACTCAGGAACCTTCACTCACCGTATCACCTGGTGG |
| | | | | AACAGTCACACTCACTTGTGGCTCCTCGACTGGGGCTGTTACATCTGGCAACTACCCAAACTGGG |
| | | | | TCCAACAAAAACCAGGTCAGGCACCCCGTGGTCTAATAGGTGGGACTAAGTTCCTCGCCCCCGGT |
| | | | | ACTCCTGCCAGATTCTCAGGCTCCCTGCTTGGAGGCAAGGCTGCCCTCACCCTCTCAGGGGTACA |
| | | | | GCCAGAGGATGAGGCAGAATATTACTGTGTTCTATGGTACAGCAACCGCTGGGTGTTCGGTGGAG |
| | | | | GAACCAAACTGACTGTCCTA |
| 299. | CD33 E11 | artificial | aa | QVQLVQSGAEVKKPGESVKVSCKASGYTFTNYGMNWVKQAPGQGLEWMGWINTYTGEPTYADKFQ |
| | HL x H2C | | | GRVTMTTDTSTSTAYMEIRNLGGDDTAVYYCARWSWSDGYYVYFDYWGQGTSVTVSSggggsggg |
| | HL | | | gsggggsDIVMTQSPDSLTVSLGERTTINCKSSQSVLDSSTNKNSLAWYQQKPGQPPKLLLSWAS |
| | | | | TRESGIPDRFSGSGSGTDFTLTIDSPQPEDSATYYCQQSAHFPITFGQGTRLEIKSGGGGSEVQL |
| | | | | VESGGGLVQPGGSLKLSCAASGFTFNKYAMNWVRQAPGKGLEWVARIRSKYNNYATYYADSVKDR |
| | | | | FTISRDDSKNTAYLQMNNLKTEDTAVYYCVRHGNFGNSYISYWAYWGQGTLVTVSSGGGGSGGGG |
| | | | | SGGGGSQTVVTQEPSLTVSPGGTVTLTCGSSTGAVTSGYYPNWVQQKPGQAPRGLIGGTKFLAPG |
| | | | | TPARFSGSLLGGKAALTLSGVQPEDEAEYYCALWYSNRWVFGGGTKLTVL |
| 300. | CD33 E11 | artificial | nt | CAGGTGCAGCTGGTGCAGTCTGGAGCTGAGGTGAAGAAGCCTGGAGAGTCAGTCAAGGTCTCCTG |
| | HL x H2C | | | CAAGGCTAGCGGGTATACCTTCACAAACTATGGAATGAACTGGGTGAAGCAGGCTCCAGGACAGG |
| | HL | | | GTTTAGAGTGGATGGGCTGGATAAACACCTACACTGGAGAGCCAACCTATGCTGATAAGTTCCAG |
| | | | | GGACGCGTTACCATGACTACGGATACCTCTACCAGCACTGCCTATATGGAAATCCGCAACCTCGG |
| | | | | AGGTGATGACACGGCTGTATATTACTGTGCGCGCTGGAGTTGGAGTGATGGTTACTACGTTTACT |
| | | | | TTGACTACTGGGGCCAAGGCACTTCGGTCACCGTCTCCTCAGGTGGTGGTGGTTCTGGCGGCGGC |
| | | | | GGCTCCGGTGGTGGTGGTTCTGACATCGTGATGACACAGTCTCCAGACTCCCTGACTGTGTCTCT |
| | | | | GGGCGAGAGGACCACCATCAACTGCAAGTCCAGCCAGAGTGTTTTAGACAGCTCCACGAATAAGA |
| | | | | ACTCCTTAGCTTGGTACCAGCAGAAACCAGGACAGCCTCCTAAATTACTCCTTTCCTGGGCATCT |
| | | | | ACGCGGGAATCCGGGATCCCTGACCGATTCAGTGGCAGCGGGTCTGGGACAGATTTCACTCTCAC |
| | | | | TATTGACAGCCCGCAGCCTGAAGATTCTGCAACTTACTATTGTCAACAGTCTGCCCACTTCCCGA |
| | | | | TCACCTTTGGCCAAGGGACACGACTGGAGATTAAATCCGGAGGTGGTGGCTCCGAGGTGCAGCTG |
| | | | | GTCGAGTCTGGAGGAGGATTGGTGCAGCCTGGAGGGTCATTGAAACTCTCATGTGCAGCCTCTGG |
| | | | | ATTCACCTTCAATAAGTACGCCATGAACTGGGTCCGCCAGGCTCCAGGAAAGGGTTTGGAATGGG |
| | | | | TTGCTCGCATAAGAAGTAAATATAATAATTATGCAACATATTATGCCGATTCAGTGAAAGACAGG |
| | | | | TTCACCATCTCCAGAGATGATTCAAAAAACACTGCCTATCTACAAATGAACAACTTGAAAACTGA |
| | | | | GGACACTGCCGTGTACTACTGTGTGAGACATGGGAACTTCGGTAATAGCTACATATCCTACTGGG |
| | | | | CTTACTGGGGCCAAGGGACTCTGGTCACCGTCTCCTCAGGTGGTGGTGGTTCTGGCGGCGGCGGC |
| | | | | TCCGGTGGTGGTGGTTCTCAGACTGTTGTGACTCAGGAACCTTCACTCACCGTATCACCTGGTGG |
| | | | | AACAGTCACACTCACTTGTGGCTCCTCGACTGGGGCTGTTACATCTGGCTACTACCCAAACTGGG |
| | | | | TCCAACAAAAACCAGGTCAGGCACCCCGTGGTCTAATAGGTGGGACTAAGTTCCTCGCCCCCGGT |
| | | | | ACTCCTGCCAGATTCTCAGGCTCCCTGCTTGGAGGCAAGGCTGCCCTCACCCTCTCAGGGGTACA |
| | | | | GCCAGAGGATGAGGCAGAATATTACTGTGCTCTATGGTACAGCAACCGCTGGGTGTTCGGTGGAG |
| | | | | GAACCAAACTGACTGTCCTA |
| 301. | CD33 E11 HL x | artificial | aa | QVQLVQSGAEVKKPGESVKVSCKASGYTFTNYGMNWVKQAPGQGLEWMGWINTYTGEPTYADKFQ |
| | F12Q HL | | | GRVTMTTDTSTSTAYMEIRNLGGDDTAVYYCARWSWSDGYYVYFDYWGQGTSVTVSSggggsggg |
| | | | | gsggggsDIVMTQSPDSLTVSLGERTTINCKSSQSVLDSSTNKNSLAWYQQKPGQPPKLLLSWAS |
| | | | | TRESGIPDRFSGSGSGTDFTLTIDSPQPEDSATYYCQQSAHFPITFGQGTRLEIKSGGGGSEVQL |
| | | | | VESGGGLVQPGGSLKLSCAASGFTFNSYAMNWVRQAPGKGLEWVARIRSKYNNYATYYADSVKGR |
| | | | | FTISRDDSKNTAYLQMNNLKTEDTAVYYCVRHGNFGNSYVSWWAYWGQGTLVTVSSGGGGSGGGG |
| | | | | SGGGGSQTVVTQEPSLTVSPGGTVTLTCGSSTGAVTSGNYPNWVQQKPGQAPRGLIGGTKFLAPG |
| | | | | TPARFSGSLLGGKAALTLSGVQPEDEAEYYCVLWYSNRWVFGGGTKLTVL |
| 302. | CD33 E11 HL x | artificial | nt | CAGGTGCAGCTGGTGCAGTCTGGAGCTGAGGTGAAGAAGCCTGGAGAGTCAGTCAAGGTCTCCTG |
| | F12Q HL | | | CAAGGCTAGCGGGTATACCTTCACAAACTATGGAATGAACTGGGTGAAGCAGGCTCCAGGACAGG |
| | | | | GTTTAGAGTGGATGGGCTGGATAAACACCTACACTGGAGAGCCAACCTATGCTGATAAGTTCCAG |
| | | | | GGACGCGTTACCATGACTACGGATACCTCTACCAGCACTGCCTATATGGAAATCCGCAACCTCGG |
| | | | | AGGTGATGACACGGCTGTATATTACTGTGCGCGCTGGAGTTGGAGTGATGGTTACTACGTTTACT |
| | | | | TTGACTACTGGGGCCAAGGCACTTCGGTCACCGTCTCCTCAGGTGGTGGTGGTTCTGGCGGCGGC |
| | | | | GGCTCCGGTGGTGGTGGTTCTGACATCGTGATGACACAGTCTCCAGACTCCCTGACTGTGTCTCT |
| | | | | GGGCGAGAGGACCACCATCAACTGCAAGTCCAGCCAGAGTGTTTTAGACAGCTCCACGAATAAGA |
| | | | | ACTCCTTAGCTTGGTACCAGCAGAAACCAGGACAGCCTCCTAAATTACTCCTTTCCTGGGCATCT |
| | | | | ACGCGGGAATCCGGGATCCCTGACCGATTCAGTGGCAGCGGGTCTGGGACAGATTTCACTCTCAC |
| | | | | TATTGACAGCCCGCAGCCTGAAGATTCTGCAACTTACTATTGTCAACAGTCTGCCCACTTCCCGA |
| | | | | TCACCTTTGGCCAAGGGACACGACTGGAGATTAAATCCGGAGGTGGTGGCTCCGAGGTGCAGCTG |
| | | | | GTCGAGTCTGGAGGAGGATTGGTGCAGCCTGGAGGGTCATTGAAACTCTCATGTGCAGCCTCTGG |
| | | | | ATTCACCTTCAATAGCTACGCCATGAACTGGGTCCGCCAGGCTCCAGGAAAGGGTTTGGAATGGG |
| | | | | TTGCTCGCATAAGAAGTAAATATAATAATTATGCAACATATTATGCCGATTCAGTGAAAGGCAGG |
| | | | | TTCACCATCTCCAGAGATGATTCAAAAAACACTGCCTATCTACAAATGAACAACTTGAAAACTGA |
| | | | | GGACACTGCCGTGTACTACTGTGTGAGACATGGGAACTTCGGTAATAGCTACGTTTCCTGGTGGG |
| | | | | CTTACTGGGGCCAAGGGACTCTGGTCACCGTCTCCTCAGGTGGTGGTGGTTCTGGCGGCGGCGGC |
| | | | | TCCGGTGGTGGTGGTTCTCAGACTGTTGTGACTCAGGAACCTTCACTCACCGTATCACCTGGTGG |
| | | | | AACAGTCACACTCACTTGTGGCTCCTCGACTGGGGCTGTTACATCTGGCAACTACCCAAACTGGG |
| | | | | TCCAACAAAAACCAGGTCAGGCACCCCGTGGTCTAATAGGTGGGACTAAGTTCCTCGCCCCCGGT |
| | | | | ACTCCTGCCAGATTCTCAGGCTCCCTGCTTGGAGGCAAGGCTGCCCTCACCCTCTCAGGGGTACA |
| | | | | GCCAGAGGATGAGGCAGAATATTACTGTGTTCTATGGTACAGCAACCGCTGGGTGTTCGGTGGAG |
| | | | | GAACCAAACTGACTGTCCTA |
| 303. | CD33 E11 HL x | artificial | aa | QVQLVQSGAEVKKPGESVKVSCKASGYTFTNYGMNWVKQAPGQGLEWMGWINTYTGEPTYADKFQ |
| | I2C HL | | | GRVTMTTDTSTSTAYMEIRNLGGDDTAVYYCARWSWSDGYYVYFDYWGQGTSVTVSSggggsggg |
| | | | | gsggggsDIVMTQSPDSLTVSLGERTTINCKSSQSVLDSSTNKNSLAWYQQKPGQPPKLLLSWAS |
| | | | | TRESGIPDRFSGSGSGTDFTLTIDSPQPEDSATYYCQQSAHFPITFGQGTRLEIKSGGGGSEVQL |
| | | | | VESGGGLVQPGGSLKLSCAASGFTFNKYAMNWVRQAPGKGLEWVARIRSKYNNYATYYADSVKDR |
| | | | | FTISRDDSKNTAYLQMNNLKTEDTAVYYCVRHGNFGNSYISYWAYWGQGTLVTVSSGGGGSGGGG |
| | | | | SGGGGSQTVVTQEPSLTVSPGGTVTLTCGSSTGAVTSGNYPNWVQQKPGQAPRGLIGGTKFLAPG |
| | | | | TPARFSGSLLGGKAALTLSGVQPEDEAEYYCVLWYSNRWVFGGGTKLTVL |
| 304. | CD33 E11 HL x | artificial | nt | CAGGTGCAGCTGGTGCAGTCTGGAGCTGAGGTGAAGAAGCCTGGAGAGTCAGTCAAGGTCTCCTG |
| | I2C HL | | | CAAGGCTAGCGGGTATACCTTCACAAACTATGGAATGAACTGGGTGAAGCAGGCTCCAGGACAGG |
| | | | | GTTTAGAGTGGATGGGCTGGATAAACACCTACACTGGAGAGCCAACCTATGCTGATAAGTTCCAG |
| | | | | GGACGCGTTACCATGACTACGGATACCTCTACCAGCACTGCCTATATGGAAATCCGCAACCTCGG |
| | | | | AGGTGATGACACGGCTGTATATTACTGTGCGCGCTGGAGTTGGAGTGATGGTTACTACGTTTACT |
| | | | | TTGACTACTGGGGCCAAGGCACTTCGGTCACCGTCTCCTCAGGTGGTGGTGGTTCTGGCGGCGGC |
| | | | | GGCTCCGGTGGTGGTGGTTCTGACATCGTGATGACACAGTCTCCAGACTCCCTGACTGTGTCTCT |
| | | | | GGGCGAGAGGACCACCATCAACTGCAAGTCCAGCCAGAGTGTTTTAGACAGCTCCACGAATAAGA |
| | | | | ACTCCTTAGCTTGGTACCAGCAGAAACCAGGACAGCCTCCTAAATTACTCCTTTCCTGGGCATCT |
| | | | | ACGCGGGAATCCGGGATCCCTGACCGATTCAGTGGCAGCGGGTCTGGGACAGATTTCACTCTCAC |
| | | | | TATTGACAGCCCGCAGCCTGAAGATTCTGCAACTTACTATTGTCAACAGTCTGCCCACTTCCCGA |
| | | | | TCACCTTTGGCCAAGGGACACGACTGGAGATTAAATCCGGAGGTGGTGGCTCCGAGGTGCAGCTG |
| | | | | GTCGAGTCTGGAGGAGGATTGGTGCAGCCTGGAGGGTCATTGAAACTCTCATGTGCAGCCTCTGG |
| | | | | ATTCACCTTCAATAAGTACGCCATGAACTGGGTCCGCCAGGCTCCAGGAAAGGGTTTGGAATGGG |
| | | | | TTGCTCGCATAAGAAGTAAATATAATAATTATGCAACATATTATGCCGATTCAGTGAAAGACAGG |
| | | | | TTCACCATCTCCAGAGATGATTCAAAAAACACTGCCTATCTACAAATGAACAACTTGAAAACTGA |
| | | | | GGACACTGCCGTGTACTACTGTGTGAGACATGGGAACTTCGGTAATAGCTACATATCCTACTGGG |
| | | | | CTTACTGGGGCCAAGGGACTCTGGTCACCGTCTCCTCAGGTGGTGGTGGTTCTGGCGGCGGCGGC |
| | | | | TCCGGTGGTGGTGGTTCTCAGACTGTTGTGACTCAGGAACCTTCACTCACCGTATCACCTGGTGG |
| | | | | AACAGTCACACTCACTTGTGGCTCCTCGACTGGGGCTGTTACATCTGGCAACTACCCAAACTGGG |
| | | | | TCCAACAAAAACCAGGTCAGGCACCCCGTGGTCTAATAGGTGGGACTAAGTTCCTCGCCCCCGGT |
| | | | | ACTCCTGCCAGATTCTCAGGCTCCCTGCTTGGAGGCAAGGCTGCCCTCACCCTCTCAGGGGTACA |
| | | | | GCCAGAGGATGAGGCAGAATATTACTGTGTTCTATGGTACAGCAACCGCTGGGTGTTCGGTGGAG |
| | | | | GAACCAAACTGACTGTCCTA |
| 305. | CD33 | human | nt | ATGGGATGGAGCTGTATCATCCTCTTCTTGGTAGCAACAGCTACAGGTGTACACTCCGATCCAAA |
| | | | | TTTCTGGCTGCAAGTGCAGGAGTCAGTGACGGTACAGGAGGGTTTGTGCGTCCTCGTGCCCTGCA |
| | | | | CTTTCTTCCATCCCATACCCTACTACGACAAGAACTCCCCAGTTCATGGTTACTGGTTCCGGGAA |
| | | | | GGAGCCATTATATCCGGGGACTCTCCAGTGGCCACAAACAAGCTAGATCAAGAAGTACAGGAGGA |
| | | | | GACTCAGGGCAGATTCCGCCTCCTTGGGGATCCCAGTAGGAACAACTGCTCCCTGAGCATCGTAG |
| | | | | ACGCCAGGAGGAGGGATAATGGTTCATACTTCTTTCGGATGGAGAGAGGAAGTACCAAATACAGT |
| | | | | TACAAATCTCCCCAGCTCTCTGTGCATGTGACAGACTTGACCCACAGGCCCAAAATCCTCATCCC |
| | | | | TGGCACTCTAGAACCCGGCCACTCCAAAAACCTGACCTGCTCTGTGTCCTGGGCCTGTGAGCAGG |
| | | | | GAACACCCCCGATCTTCTCCTGGTTGTCAGCTGCCCCCACCTCCCTGGGCCCCAGGACTACTCAC |
| | | | | TCCTCGGTGCTCATAATCACCCCACGGCCCCAGGACCACGGCACCAACCTGACCTGTCAGGTGAA |
| | | | | GTTCGCTGGAGCTGGTGTGACTACGGAGAGAACCATCCAGCTCAACGTCACCTATGTTCCACAGA |
| | | | | ACCCAACAACTGGTATCTTTCCAGGAGATGGCTCAGGGAAACAAGAGACCAGAGCAGGAGTGGTT |
| | | | | CATGGGGCCATTGGAGGAGCTGGTGTTACAGCCCTGCTCGCTCTTTGTCTCTGCCTCATCTTCTT |
| | | | | CATAGTGAAGACCCACAGGAGGAAAGCAGCCAGGACAGCAGTGGGCAGGAATGACACCCACCCTA |
| | | | | CCACAGGGTCAGCCTCCCCGAAACACCAGAAGAAGTCCAAGTTACATGGCCCCACTGAAACCTCA |
| | | | | AGCTGTTCAGGTGCCGCCCCTACTGTGGAGATGGATGAGGAGCTGCATTATGCTTCCCTCAACTT |
| | | | | TCATGGGATGAATCCTTCCAAGGACACCTCCACCGAATACTCAGAGGTCAGGACCCAGTCCGGGC |
| | | | | ATCATCACCATCATCATTGA |
| 306. | CD33 | human | aa | MGWSCIILFLVATATGVHSDPNFWLQVQESVTVQEGLCVLVPCTFFHPIPYYDKNSPVHGYWFRE |
| | | | | GAIISGDSPVATNKLDQEVQEETQGRFRLLGDPSRNNCSLSIVDARRRDNGSYFFRMERGSTKYS |
| | | | | YKSPQLSVHVTDLTHRPKILIPGTLEPGHSKNLTCSVSWACEQGTPPIFSWLSAAPTSLGPRTTH |
| | | | | SSVLIITPRPQDHGTNLTCQVKFAGAGVTTERTIQLNVTYVPQNPTTGIFPGDGSGKQETRAGVV |
| | | | | HGAIGGAGVTALLALCLCLIFFIVKTHRRKAARTAVGRNDTHPTTGSASPKHQKKSKLHGPTETS |
| | | | | SCSGAAPTVEMDEELHYASLNFHGMNPSKDTSTEYSEVRTQSGHHHHHH |
| 307. | CD33 | macaque | nt | ATGCCGCTGCTGCTACTGCTGCCCCTGCTGTGGGCAGGGGCCCTGGCTATGGATCCAAGAGTCAG |
| | | | | GCTGGAAGTGCAGGAGTCAGTGACAGTACAGGAGGGTTTGTGCGTCCTTGTGCCCTGCACTTTCT |
| | | | | TCCATCCCGTACCCTACCACACCAGGAATTCCCCAGTTCATGGTTACTGGTTCCGGGAAGGAGCC |
| | | | | ATTGTATCCTTGGACTCTCCAGTGGCCACAAACAAGCTAGATCAAGAAGTACAGGAGGAGACCCA |
| | | | | GGGCCGATTCCGCCTCCTTGGGGATCCCAGTAGGAACAACTGCTCCCTGAGCATCGTAGATGCCA |
| | | | | GGAGGAGGGATAACGGTTCATACTTCTTTCGGATGGAGAAAGGAAGTACCAAATACAGTTACAAA |
| | | | | TCTACCCAGCTCTCTGTGCATGTGACAGACTTGACCCACAGGCCCCAAATCCTCATCCCTGGAGC |
| | | | | CCTAGACCCTGACCACTCCAAAAACCTGACCTGCTCTGTGCCCTGGGCCTGTGAGCAGGGAACAC |
| | | | | CTCCAATCTTCTCCTGGATGTCAGCTGCCCCCACCTCCCTGGGCCTCAGGACCACTCACTCCTCG |
| | | | | GTGCTCATAATCACCCCACGGCCCCAGGACCACGGCACCAACCTCACCTGTCAGGTGAAGTTCCC |
| | | | | TGGAGCTGGCGTGACCACGGAGAGAACCATCCAGCTCAATGTCTCCTATGCTTCACAGAACCCAA |
| | | | | GAACTGATATCTTTCTAGGAGACGGCTCAGGGAAACAAGGAGTGGTTCAGGGAGCCATCGGGGGA |
| | | | | GCTGGTGTCACAGTCCTGCTCGCTCTTTGTCTCTGCCTCATCTTCTTCACAGTGAAGACTCACAG |
| | | | | GAGGAAAGCAGCCAGGACAGCAGTGGGCAGGATCGACACCCACCCCGCCACAGGGCCAACATCCT |
| | | | | CGAAACACCAGAAGAAGTCCAAGTTACATGGCGCCACTGAAACCTCAGGCTGTTCAGGTACCACC |
| | | | | CTTACTGTGGAGATGGATGAGGAGCTGCACTACGCTTCCCTCAACTTTCATGGGATGAATCCTTC |
| | | | | TGAGGACACCTCCACCGAATACTCAGAGGTCAGGACCCAGTGA |
| 308. | CD33 | macaque | aa | MPLLLLLPLLWAGALAMDPRVRLEVQESVTVQEGLCVLVPCTFFHPVPYHTRNSPVHGYWFREGA |
| | | | | IVSLDSPVATNKLDQEVQEETQGRFRLLGDPSRNNCSLSIVDARRRDNGSYFFRMEKGSTKYSYK |
| | | | | STQLSVHVTDLTHRPQILIPGALDPDHSKNLTCSVPWACEQGTPPIFSWMSAAPTSLGLRTTHSS |
| | | | | VLIITPRPQDHGTNLTCQVKFPGAGVTTERTIQLNVSYASQNPRTDIFLGDGSGKQGVVQGAIGG |
| | | | | AGVTVLLALCLCLIFFTVKTHRRKAARTAVGRIDTHPATGPTSSKHQKKSKLHGATETSGCSGTT |
| | | | | LTVEMDEELHYASLNFHGMNPSEDTSTEYSEVRTQ |
| 309. | 1-27 CD3-Fc + | artificial | nt | ATGGGATGGAGCTGTATCATCCTCTTCTTGGTAGCAACAGCTACAGGTGTACACTCCCAAGATGG |
| | Leader | | | TAATGAAGAAATGGGTGGTATTACACAGACACCATATAAAGTCTCCATCTCTGGAACCACAGTAA |
| | | | | TATTGACATCCGGAGAGCCCAAATCTTGTGACAAAACTCACACATGCCCACCGTGCCCAGCACCT |
| | | | | GAACTCCTGGGGGGACCGTCAGTCTTCCTCTTCCCCCCAAAACCCAAGGACACCCTCATGATCTC |
| | | | | CCGGACCCCTGAGGTCACATGCGTGGTGGTGGACGTGAGCCACGAAGACCCTGAGGTCAAGTTCA |
| | | | | ACTGGTACGTGGACGGCGTGGAGGTGCATAATGCCAAGACAAAGCCGCGGGAGGAGCAGTACAAC |
| | | | | AGCACGTACCGTGTGGTCAGCGTCCTCACCGTCCTGCACCAGGACTGGCTGAATGGCAAGGAGTA |
| | | | | CAAGTGCAAGGTCTCCAACAAAGCCCTCCCAGCCCCCATCGAGAAAACCATCTCCAAAGCCAAAG |
| | | | | GGCAGCCCCGAGAACCACAGGTGTACACCCTGCCCCCATCCCGGGAGGAGATGACCAAGAACCAG |
| | | | | GTCAGCCTGACCTGCCTGGTCAAAGGCTTCTATCCCAGCGACATCGCCGTGGAGTGGGAGAGCAA |
| | | | | TGGGCAGCCGGAGAACAACTACAAGACCACGCCTCCCGTGCTGGACTCCGACGGCTCCTTCTTCC |
| | | | | TCTATAGCAAGCTCACCGTGGACAAGAGCAGGTGGCAGCAGGGGAACGTCTTCTCATGCTCCGTG |
| | | | | ATGCATGAGGCTCTGCACAACCACTACACGCAGAAGAGCCTCTCCCTGTCCCCGGGTAAATAG |
| 310. | 1-27 CD3-Fc + | artificial | aa | MGWSCIILFLVATATGVHSQDGNEEMGGITQTPYKVSISGTTVILTSGEPKSCDKTHTCPPCPAP |
| | Leader | | | ELLGGPSVFLFPPKPKDTLMISRTPEVTCVVVDVSHEDPEVKFNWYVDGVEVHNAKTKPREEQYN |
| | | | | STYRVVSVLTVLHQDWLNGKEYKCKVSNKALPAPIEKTISKAKGQPREPQVYTLPPSREEMTKNQ |
| | | | | VSLTCLVKGFYPSDIAVEWESNGQPENNYKTTPPVLDSDGSFFLYSKLTVDKSRWQQGNVFSCSV |
| | | | | MHEALHNHYTQKSLSLSPGK |
| 311. | CD33 UD H2C | artificial | aa | EVQLVESGGGLVQPGGSLKLSCAASGFTFNKYAMNWVRQAPGKGLEWVARIRSKYNNYATYYADS |
| | HL x AF5 HL | | | VKDRFTISRDDSKNTAYLQMNNLKTEDTAVYYCVRHGNFGNSYISYWAYWGQGTLVTVSSGGGGS |
| | | | | GGGGSGGGGSQTVVTQEPSLTVSPGGTVTLTCGSSTGAVTSGYYPNWVQQKPGQAPRGLIGGTKF |
| | | | | LAPGTPARFSGSLLGGKAALTLSGVQPEDEAEYYCALWYSNRWVFGGGTKLTVLSGGGGSQVQLV |
| | | | | QSGAEVKKPGASVKVSCKASGYTFTNYGMNWVKQAPGQGLKWMGWINTYTGEPTYADDFKGRVTM |
| | | | | TSDTSTSTAYLELHNLRSDDTAVYYCARWSWSDGYYVYFDYWGQGTTVTVSSGGGGSGGGGSGGG |
| | | | | GSDIVMTQSPDSLTVSLGERTTINCKSSQSVLDSSKNKNSLAWYQQKPGQPPKLLLSWASTRESG |
| | | | | IPDRFSGSGSGTDFTLTIDSLQPEDSATYYCQQSAHFPITFGQGTRLEIK |
| 312. | CD33 UD H2C | artificial | nt | GAGGTGCAGCTGGTCGAGTCTGGAGGAGGATTGGTGCAGCCTGGAGGGTCATTGAAACTCTCATG |
| | HL x AF5 HL | | | TGCAGCCTCTGGATTCACCTTCAATAAGTACGCCATGAACTGGGTCCGCCAGGCTCCAGGAAAGG |
| | | | | GTTTGGAATGGGTTGCTCGCATAAGAAGTAAATATAATAATTATGCAACATATTATGCCGATTCA |
| | | | | GTGAAAGACAGGTTCACCATCTCCAGAGATGATTCAAAAAACACTGCCTATCTACAAATGAACAA |
| | | | | CTTGAAAACTGAGGACACTGCCGTGTACTACTGTGTGAGACATGGGAACTTCGGTAATAGCTACA |
| | | | | TATCCTACTGGGCTTACTGGGGCCAAGGGACTCTGGTCACCGTCTCCTCAGGTGGTGGTGGTTCT |
| | | | | GGCGGCGGCGGCTCCGGTGGTGGTGGTTCTCAGACTGTTGTGACTCAGGAACCTTCACTCACCGT |
| | | | | ATCACCTGGTGGAACAGTCACACTCACTTGTGGCTCCTCGACTGGGGCTGTTACATCTGGCTACT |
| | | | | ACCCAAACTGGGTCCAACAAAAACCAGGTCAGGCACCCCGTGGTCTAATAGGTGGGACTAAGTTC |
| | | | | CTCGCCCCCGGTACTCCTGCCAGATTCTCAGGCTCCCTGCTTGGAGGCAAGGCTGCCCTCACCCT |
| | | | | CTCAGGGGTACAGCCAGAGGATGAGGCAGAATATTACTGTGCTCTATGGTACAGCAACCGCTGGG |
| | | | | TGTTCGGTGGAGGAACCAAACTGACTGTCCTATCCGGAGGTGGTGGCTCCCAGGTGCAGCTGGTC |
| | | | | CAGTCTGGAGCTGAGGTGAAGAAGCCTGGAGCGTCAGTCAAGGTCTCCTGCAAGGCTAGCGGGTA |
| | | | | TACCTTCACAAACTATGGAATGAACTGGGTGAAGCAGGCTCCAGGACAGGGTTTAAAGTGGATGG |
| | | | | GCTGGATAAACACCTACACTGGAGAGCCAACATATGCTGATGACTTCAAGGGACGGGTTACCATG |
| | | | | ACTTCGGATACCTCTACCAGCACTGCCTATTTGGAACTCCACAACCTCAGAAGTGATGACACGGC |
| | | | | TGTATATTACTGTGCGCGCTGGAGTTGGAGTGATGGTTACTACGTTTACTTTGACTACTGGGGCC |
| | | | | AAGGCACTACGGTCACCGTCTCCTCAGGTGGTGGTGGTTCTGGCGGCGGCGGCTCCGGTGGTGGT |
| | | | | GGTTCTGACATCGTGATGACACAGTCTCCAGACTCCCTGACTGTGTCTCTGGGCGAGAGGACCAC |
| | | | | CATCAACTGCAAGTCCAGCCAGAGTGTTTTAGACAGCTCCAAGAATAAGAACTCCTTAGCTTGGT |
| | | | | ACCAGCAGAAACCAGGACAGCCTCCTAAATTACTCCTTTCCTGGGCATCTACGCGGGAATCCGGG |
| | | | | ATCCCTGACCGATTCAGTGGCAGCGGGTCTGGGACAGATTTCACTCTCACTATTGACAGCCTGCA |
| | | | | GCCTGAAGATTCTGCAACTTACTATTGTCAACAGTCTGCCCACTTCCCGATCACCTTTGGCCAAG |
| | | | | GGACACGACTGGAGATTAAA |
| 313. | CD33 UD F12Q | artificial | aa | EVQLVESGGGLVQPGGSLKLSCAASGFTFNSYAMNWVRQAPGKGLEWVARIRSKYNNYATYYADS |
| | HL x AF5 HL | | | VKGRFTISRDDSKNTAYLQMNNLKTEDTAVYYCVRHGNFGNSYVSWWAYWGQGTLVTVSSGGGGS |
| | | | | GGGGSGGGGSQTVVTQEPSLTVSPGGTVTLTCGSSTGAVTSGNYPNWVQQKPGQAPRGLIGGTKF |
| | | | | LAPGTPARFSGSLLGGKAALTLSGVQPEDEAEYYCVLWYSNRWVFGGGTKLTVLSGGGGSQVQLV |
| | | | | QSGAEVKKPGASVKVSCKASGYTFTNYGMNWVKQAPGQGLKWMGWINTYTGEPTYADDFKGRVTM |
| | | | | TSDTSTSTAYLELHNLRSDDTAVYYCARWSWSDGYYVYFDYWGQGTTVTVSSGGGGSGGGGSGGG |
| | | | | GSDIVMTQSPDSLTVSLGERTTINCKSSQSVLDSSKNKNSLAWYQQKPGQPPKLLLSWASTRESG |
| | | | | IPDRFSGSGSGTDFTLTIDSLQPEDSATYYCQQSAHFPITFGQGTRLEIK |
| 314. | CD33 UD | artificial | nt | GAGGTGCAGCTGGTCGAGTCTGGAGGAGGATTGGTGCAGCCTGGAGGGTCATTGAAACTCTCATG |
| | F12QHL x AF5 | | | TGCAGCCTCTGGATTCACCTTCAATAGCTACGCCATGAACTGGGTCCGCCAGGCTCCAGGAAAGG |
| | HL | | | GTTTGGAATGGGTTGCTCGCATAAGAAGTAAATATAATAATTATGCAACATATTATGCCGATTCA |
| | | | | GTGAAAGGCAGGTTCACCATCTCCAGAGATGATTCAAAAAACACTGCCTATCTACAAATGAACAA |
| | | | | CTTGAAAACTGAGGACACTGCCGTGTACTACTGTGTGAGACATGGGAACTTCGGTAATAGCTACG |
| | | | | TTTCCTGGTGGGCTTACTGGGGCCAAGGGACTCTGGTCACCGTCTCCTCAGGTGGTGGTGGTTCT |
| | | | | GGCGGCGGCGGCTCCGGTGGTGGTGGTTCTCAGACTGTTGTGACTCAGGAACCTTCACTCACCGT |
| | | | | ATCACCTGGTGGAACAGTCACACTCACTTGTGGCTCCTCGACTGGGGCTGTTACATCTGGCAACT |
| | | | | ACCCAAACTGGGTCCAACAAAAACCAGGTCAGGCACCCCGTGGTCTAATAGGTGGGACTAAGTTC |
| | | | | CTCGCCCCCGGTACTCCTGCCAGATTCTCAGGCTCCCTGCTTGGAGGCAAGGCTGCCCTCACCCT |
| | | | | CTCAGGGGTACAGCCAGAGGATGAGGCAGAATATTACTGTGTTCTATGGTACAGCAACCGCTGGG |
| | | | | TGTTCGGTGGAGGAACCAAACTGACTGTCCTATCCGGAGGTGGTGGCTCCCAGGTGCAGCTGGTC |
| | | | | CAGTCTGGAGCTGAGGTGAAGAAGCCTGGAGCGTCAGTCAAGGTCTCCTGCAAGGCTAGCGGGTA |
| | | | | TACCTTCACAAACTATGGAATGAACTGGGTGAAGCAGGCTCCAGGACAGGGTTTAAAGTGGATGG |
| | | | | GCTGGATAAACACCTACACTGGAGAGCCAACATATGCTGATGACTTCAAGGGACGGGTTACCATG |
| | | | | ACTTCGGATACCTCTACCAGCACTGCCTATTTGGAACTCCACAACCTCAGAAGTGATGACACGGC |
| | | | | TGTATATTACTGTGCGCGCTGGAGTTGGAGTGATGGTTACTACGTTTACTTTGACTACTGGGGCC |
| | | | | AAGGCACTACGGTCACCGTCTCCTCAGGTGGTGGTGGTTCTGGCGGCGGCGGCTCCGGTGGTGGT |
| | | | | GGTTCTGACATCGTGATGACACAGTCTCCAGACTCCCTGACTGTGTCTCTGGGCGAGAGGACCAC |
| | | | | CATCAACTGCAAGTCCAGCCAGAGTGTTTTAGACAGCTCCAAGAATAAGAACTCCTTAGCTTGGT |
| | | | | ACCAGCAGAAACCAGGACAGCCTCCTAAATTACTCCTTTCCTGGGCATCTACGCGGGAATCCGGG |
| | | | | ATCCCTGACCGATTCAGTGGCAGCGGGTCTGGGACAGATTTCACTCTCACTATTGACAGCCTGCA |
| | | | | GCCTGAAGATTCTGCAACTTACTATTGTCAACAGTCTGCCCACTTCCCGATCACCTTTGGCCAAG |
| | | | | GGACACGACTGGAGATTAAA |
| 315. | CD33 UD I2C | artificial | aa | EVQLVESGGGLVQPGGSLKLSCAASGFTFNKYAMNWVRQAPGKGLEWVARIRSKYNNYATYYADS |
| | HL x AF5 HL | | | VKDRFTISRDDSKNTAYLQMNNLKTEDTAVYYCVRHGNFGNSYISYWAYWGQGTLVTVSSGGGGS |
| | | | | GGGGSGGGGSQTVVTQEPSLTVSPGGTVTLTCGSSTGAVTSGNYPNWVQQKPGQAPRGLIGGTKF |
| | | | | LAPGTPARFSGSLLGGKAALTLSGVQPEDEAEYYCVLWYSNRWVFGGGTKLTVLSGGGGSQVQLV |
| | | | | QSGAEVKKPGASVKVSCKASGYTFTNYGMNWVKQAPGQGLKWMGWINTYTGEPTYADDFKGRVTM |
| | | | | TSDTSTSTAYLELHNLRSDDTAVYYCARWSWSDGYYVYFDYWGQGTTVTVSSGGGGSGGGGSGGG |
| | | | | GSDIVMTQSPDSLTVSLGERTTINCKSSQSVLDSSKNKNSLAWYQQKPGQPPKLLLSWASTRESG |
| | | | | IPDRFSGSGSGTDFTLTIDSLQPEDSATYYCQQSAHFPITFGQGTRLEIK |
| 316. | CD33 UD I2C | artificial | nt | GAGGTGCAGCTGGTCGAGTCTGGAGGAGGATTGGTGCAGCCTGGAGGGTCATTGAAACTCTCATG |
| | HL x AF5 HL | | | TGCAGCCTCTGGATTCACCTTCAATAAGTACGCCATGAACTGGGTCCGCCAGGCTCCAGGAAAGG |
| | | | | GTTTGGAATGGGTTGCTCGCATAAGAAGTAAATATAATAATTATGCAACATATTATGCCGATTCA |
| | | | | GTGAAAGACAGGTTCACCATCTCCAGAGATGATTCAAAAAACACTGCCTATCTACAAATGAACAA |
| | | | | CTTGAAAACTGAGGACACTGCCGTGTACTACTGTGTGAGACATGGGAACTTCGGTAATAGCTACA |
| | | | | TATCCTACTGGGCTTACTGGGGCCAAGGGACTCTGGTCACCGTCTCCTCAGGTGGTGGTGGTTCT |
| | | | | GGCGGCGGCGGCTCCGGTGGTGGTGGTTCTCAGACTGTTGTGACTCAGGAACCTTCACTCACCGT |
| | | | | ATCACCTGGTGGAACAGTCACACTCACTTGTGGCTCCTCGACTGGGGCTGTTACATCTGGCAACT |
| | | | | ACCCAAACTGGGTCCAACAAAAACCAGGTCAGGCACCCCGTGGTCTAATAGGTGGGACTAAGTTC |
| | | | | CTCGCCCCCGGTACTCCTGCCAGATTCTCAGGCTCCCTGCTTGGAGGCAAGGCTGCCCTCACCCT |
| | | | | CTCAGGGGTACAGCCAGAGGATGAGGCAGAATATTACTGTGTTCTATGGTACAGCAACCGCTGGG |
| | | | | TGTTCGGTGGAGGAACCAAACTGACTGTCCTATCCGGAGGTGGTGGCTCCCAGGTGCAGCTGGTC |
| | | | | CAGTCTGGAGCTGAGGTGAAGAAGCCTGGAGCGTCAGTCAAGGTCTCCTGCAAGGCTAGCGGGTA |
| | | | | TACCTTCACAAACTATGGAATGAACTGGGTGAAGCAGGCTCCAGGACAGGGTTTAAAGTGGATGG |
| | | | | GCTGGATAAACACCTACACTGGAGAGCCAACATATGCTGATGACTTCAAGGGACGGGTTACCATG |
| | | | | ACTTCGGATACCTCTACCAGCACTGCCTATTTGGAACTCCACAACCTCAGAAGTGATGACACGGC |
| | | | | TGTATATTACTGTGCGCGCTGGAGTTGGAGTGATGGTTACTACGTTTACTTTGACTACTGGGGCC |
| | | | | AAGGCACTACGGTCACCGTCTCCTCAGGTGGTGGTGGTTCTGGCGGCGGCGGCTCCGGTGGTGGT |
| | | | | GGTTCTGACATCGTGATGACACAGTCTCCAGACTCCCTGACTGTGTCTCTGGGCGAGAGGACCAC |
| | | | | CATCAACTGCAAGTCCAGCCAGAGTGTTTTAGACAGCTCCAAGAATAAGAACTCCTTAGCTTGGT |
| | | | | ACCAGCAGAAACCAGGACAGCCTCCTAAATTACTCCTTTCCTGGGCATCTACGCGGGAATCCGGG |
| | | | | ATCCCTGACCGATTCAGTGGCAGCGGGTCTGGGACAGATTTCACTCTCACTATTGACAGCCTGCA |
| | | | | GCCTGAAGATTCTGCAACTTACTATTGTCAACAGTCTGCCCACTTCCCGATCACCTTTGGCCAAG |
| | | | | GGACACGACTGGAGATTAAA |
| 317. | MCSP-A9 HL x | artificial | aa | QVQLVQSGAEVKKPGASVKVSCKASGYPFTGYYMHWVRQAPGQGLEWMGWINPNSGGTNYAQKFQ |
| | H2C HL | | | GRVTITADESTSTAYMELSRLRSDDTAVYYCAKSWVSWFASWGQGTLVTVSSGGGGSGGGGSGGG |
| | | | | GSDIVMTQSPDSLAVSLGERATINCKSSQSVLSSSNNKNYLNWYQQKPGQPPKLLIYWASTRESG |
| | | | | VPDRFSGSGSGTDFTLTISSLQAEDVAVYYCQQHFNTPFAFGQGTKLEIKSGGGGSEVQLVESGG |
| | | | | GLVQPGGSLKLSCAASGFTFNKYAMNWVRQAPGKGLEWVARIRSKYNNYATYYADSVKDRFTISR |
| | | | | DDSKNTAYLQMNNLKTEDTAVYYCVRHGNFGNSYISYWAYWGQGTLVTVSSGGGGSGGGGSGGGG |
| | | | | SQTVVTQEPSLTVSPGGTVTLTCGSSTGAVTSGYYPNWVQQKPGQAPRGLIGGTKFLAPGTPARF |
| | | | | SGSLLGGKAALTLSGVQPEDEAEYYCALWYSNRWVFGGGTKLTVL |
| 318. | MCSP-A9 HL x | artificial | nt | CAGGTGCAGCTGGTCCAGTCTGGGGCTGAGGTGAAGAAGCCTGGGGCCTCAGTGAAGGTCTCCTG |
| | H2C HL | | | CAAGGCTTCTGGATACCCCTTCACCGGCTACTACATGCACTGGGTGCGACAGGCCCCTGGACAAG |
| | | | | GGCTTGAGTGGATGGGATGGATCAACCCTAACAGTGGTGGCACAAACTATGCACAGAAGTTTCAG |
| | | | | GGCAGAGTCACGATTACCGCGGACGAATCCACGAGCACAGCCTACATGGAGCTGAGCAGGCTGAG |
| | | | | ATCTGACGACACGGCCGTGTATTACTGTGCGAAATCCTGGGTCTCCTGGTTTGCTTCCTGGGGTC |
| | | | | AAGGAACCTTGGTCACCGTCTCCTCAGGTGGTGGTGGTTCTGGCGGCGGCGGCTCCGGTGGTGGT |
| | | | | GGTTCTGACATCGTGATGACACAGTCTCCAGACTCCCTGGCTGTGTCTCTGGGCGAGAGGGCCAC |
| | | | | CATCAACTGCAAGTCCAGCCAGAGTGTCTTATCCAGCTCCAACAATAAGAACTACTTAAATTGGT |
| | | | | ACCAGCAGAAACCAGGACAGCCTCCTAAGTTGCTCATTTACTGGGCATCTACCCGGGAATCCGGG |
| | | | | GTCCCTGACCGATTCAGTGGCAGCGGGTCTGGGACAGATTTCACTCTCACCATCAGCAGCCTGCA |
| | | | | GGCTGAAGATGTGGCGGTTTATTACTGTCAACAACATTTTAATACTCCGTTCGCTTTTGGCCAGG |
| | | | | GGACCAAGCTGGAGATCAAATCCGGAGGTGGTGGATCCGAGGTGCAGCTGGTCGAGTCTGGAGGA |
| | | | | GGATTGGTGCAGCCTGGAGGGTCATTGAAACTCTCATGTGCAGCCTCTGGATTCACCTTCAATAA |
| | | | | GTACGCCATGAACTGGGTCCGCCAGGCTCCAGGAAAGGGTTTGGAATGGGTTGCTCGCATAAGAA |
| | | | | GTAAATATAATAATTATGCAACATATTATGCCGATTCAGTGAAAGACAGGTTCACCATCTCCAGA |
| | | | | GATGATTCAAAAAACACTGCCTATCTACAAATGAACAACTTGAAAACTGAGGACACTGCCGTGTA |
| | | | | CTACTGTGTGAGACATGGGAACTTCGGTAATAGCTACATATCCTACTGGGCTTACTGGGGCCAAG |
| | | | | GGACTCTGGTCACCGTCTCCTCAGGTGGTGGTGGTTCTGGCGGCGGCGGCTCCGGTGGTGGTGGT |
| | | | | TCTCAGACTGTTGTGACTCAGGAACCTTCACTCACCGTATCACCTGGTGGAACAGTCACACTCAC |
| | | | | TTGTGGCTCCTCGACTGGGGCTGTTACATCTGGCTACTACCCAAACTGGGTCCAACAAAAACCAG |
| | | | | GTCAGGCACCCCGTGGTCTAATAGGTGGGACTAAGTTCCTCGCCCCCGGTACTCCTGCCAGATTC |
| | | | | TCAGGCTCCCTGCTTGGAGGCAAGGCTGCCCTCACCCTCTCAGGGGTACAGCCAGAGGATGAGGC |
| | | | | AGAATATTACTGTGCTCTATGGTACAGCAACCGCTGGGTGTTCGGTGGAGGAACCAAACTGACTG |
| | | | | TCCTA |
| 319. | MCSP-A9 HL x | artificial | aa | QVQLVQSGAEVKKPGASVKVSCKASGYPFTGYYMHWVRQAPGQGLEWMGWINPNSGGTNYAQKFQ |
| | F12Q HL | | | GRVTITADESTSTAYMELSRLRSDDTAVYYCAKSWVSWFASWGQGTLVTVSSGGGGSGGGGSGGG |
| | | | | GSDIVMTQSPDSLAVSLGERATINCKSSQSVLSSSNNKNYLNWYQQKPGQPPKLLIYWASTRESG |
| | | | | VPDRFSGSGSGTDFTLTISSLQAEDVAVYYCQQHFNTPFAFGQGTKLEIKSGGGGSEVQLVESGG |
| | | | | GLVQPGGSLKLSCAASGFTFNSYAMNWVRQAPGKGLEWVARIRSKYNNYATYYADSVKGRFTISR |
| | | | | DDSKNTAYLQMNNLKTEDTAVYYCVRHGNFGNSYVSWWAYWGQGTLVTVSSGGGGSGGGGSGGGG |
| | | | | SQTVVTQEPSLTVSPGGTVTLTCGSSTGAVTSGNYPNWVQQKPGQAPRGLIGGTKFLAPGTPARF |
| | | | | SGSLLGGKAALTLSGVQPEDEAEYYCVLWYSNRWVFGGGTKLTVL |
| 320. | MCSP-A9 HL x | artificial | nt | CAGGTGCAGCTGGTCCAGTCTGGGGCTGAGGTGAAGAAGCCTGGGGCCTCAGTGAAGGTCTCCTG |
| | F12Q HL | | | CAAGGCTTCTGGATACCCCTTCACCGGCTACTACATGCACTGGGTGCGACAGGCCCCTGGACAAG |
| | | | | GGCTTGAGTGGATGGGATGGATCAACCCTAACAGTGGTGGCACAAACTATGCACAGAAGTTTCAG |
| | | | | GGCAGAGTCACGATTACCGCGGACGAATCCACGAGCACAGCCTACATGGAGCTGAGCAGGCTGAG |
| | | | | ATCTGACGACACGGCCGTGTATTACTGTGCGAAATCCTGGGTCTCCTGGTTTGCTTCCTGGGGTC |
| | | | | AAGGAACCTTGGTCACCGTCTCCTCAGGTGGTGGTGGTTCTGGCGGCGGCGGCTCCGGTGGTGGT |
| | | | | GGTTCTGACATCGTGATGACACAGTCTCCAGACTCCCTGGCTGTGTCTCTGGGCGAGAGGGCCAC |
| | | | | CATCAACTGCAAGTCCAGCCAGAGTGTCTTATCCAGCTCCAACAATAAGAACTACTTAAATTGGT |
| | | | | ACCAGCAGAAACCAGGACAGCCTCCTAAGTTGCTCATTTACTGGGCATCTACCCGGGAATCCGGG |
| | | | | GTCCCTGACCGATTCAGTGGCAGCGGGTCTGGGACAGATTTCACTCTCACCATCAGCAGCCTGCA |
| | | | | GGCTGAAGATGTGGCGGTTTATTACTGTCAACAACATTTTAATACTCCGTTCGCTTTTGGCCAGG |
| | | | | GGACCAAGCTGGAGATCAAATCCGGAGGTGGTGGATCCGAGGTGCAGCTGGTCGAGTCTGGAGGA |
| | | | | GGATTGGTGCAGCCTGGAGGGTCATTGAAACTCTCATGTGCAGCCTCTGGATTCACCTTCAATAG |
| | | | | CTACGCCATGAACTGGGTCCGCCAGGCTCCAGGAAAGGGTTTGGAATGGGTTGCTCGCATAAGAA |
| | | | | GTAAATATAATAATTATGCAACATATTATGCCGATTCAGTGAAAGGCAGGTTCACCATCTCCAGA |
| | | | | GATGATTCAAAAAACACTGCCTATCTACAAATGAACAACTTGAAAACTGAGGACACTGCCGTGTA |
| | | | | CTACTGTGTGAGACATGGGAACTTCGGTAATAGCTACGTTTCCTGGTGGGCTTACTGGGGCCAAG |
| | | | | GGACTCTGGTCACCGTCTCCTCAGGTGGTGGTGGTTCTGGCGGCGGCGGCTCCGGTGGTGGTGGT |
| | | | | TCTCAGACTGTTGTGACTCAGGAACCTTCACTCACCGTATCACCTGGTGGAACAGTCACACTCAC |
| | | | | TTGTGGCTCCTCGACTGGGGCTGTTACATCTGGCAACTACCCAAACTGGGTCCAACAAAAACCAG |
| | | | | GTCAGGCACCCCGTGGTCTAATAGGTGGGACTAAGTTCCTCGCCCCCGGTACTCCTGCCAGATTC |
| | | | | TCAGGCTCCCTGCTTGGAGGCAAGGCTGCCCTCACCCTCTCAGGGGTACAGCCAGAGGATGAGGC |
| | | | | AGAATATTACTGTGTTCTATGGTACAGCAACCGCTGGGTGTTCGGTGGAGGAACCAAACTGACTG |
| | | | | TCCTA |
| 321. | MCSP-A9 HL x | artificial | aa | QVQLVQSGAEVKKPGASVKVSCKASGYPFTGYYMHWVRQAPGQGLEWMGWINPNSGGTNYAQKFQ |
| | I2C HL | | | GRVTITADESTSTAYMELSRLRSDDTAVYYCAKSWVSWFASWGQGTLVTVSSGGGGSGGGGSGGG |
| | | | | GSDIVMTQSPDSLAVSLGERATINCKSSQSVLSSSNNKNYLNWYQQKPGQPPKLLIYWASTRESG |
| | | | | VPDRFSGSGSGTDFTLTISSLQAEDVAVYYCQQHFNTPFAFGQGTKLEIKSGGGGSEVQLVESGG |
| | | | | GLVQPGGSLKLSCAASGFTFNKYAMNWVRQAPGKGLEWVARIRSKYNNYATYYADSVKDRFTISR |
| | | | | DDSKNTAYLQMNNLKTEDTAVYYCVRHGNFGNSYISYWAYWGQGTLVTVSSGGGGSGGGGSGGGG |
| | | | | SQTVVTQEPSLTVSPGGTVTLTCGSSTGAVTSGNYPNWVQQKPGQAPRGLIGGTKFLAPGTPARF |
| | | | | SGSLLGGKAALTLSGVQPEDEAEYYCVLWYSNRWVFGGGTKLTVL |
| 322. | MCSP-A9 HL x | artificial | nt | CAGGTGCAGCTGGTCCAGTCTGGGGCTGAGGTGAAGAAGCCTGGGGCCTCAGTGAAGGTCTCCTG |
| | I2C HL | | | CAAGGCTTCTGGATACCCCTTCACCGGCTACTACATGCACTGGGTGCGACAGGCCCCTGGACAAG |
| | | | | GGCTTGAGTGGATGGGATGGATCAACCCTAACAGTGGTGGCACAAACTATGCACAGAAGTTTCAG |
| | | | | GGCAGAGTCACGATTACCGCGGACGAATCCACGAGCACAGCCTACATGGAGCTGAGCAGGCTGAG |
| | | | | ATCTGACGACACGGCCGTGTATTACTGTGCGAAATCCTGGGTCTCCTGGTTTGCTTCCTGGGGTC |
| | | | | AAGGAACCTTGGTCACCGTCTCCTCAGGTGGTGGTGGTTCTGGCGGCGGCGGCTCCGGTGGTGGT |
| | | | | GGTTCTGACATCGTGATGACACAGTCTCCAGACTCCCTGGCTGTGTCTCTGGGCGAGAGGGCCAC |
| | | | | CATCAACTGCAAGTCCAGCCAGAGTGTCTTATCCAGCTCCAACAATAAGAACTACTTAAATTGGT |
| | | | | ACCAGCAGAAACCAGGACAGCCTCCTAAGTTGCTCATTTACTGGGCATCTACCCGGGAATCCGGG |
| | | | | GTCCCTGACCGATTCAGTGGCAGCGGGTCTGGGACAGATTTCACTCTCACCATCAGCAGCCTGCA |
| | | | | GGCTGAAGATGTGGCGGTTTATTACTGTCAACAACATTTTAATACTCCGTTCGCTTTTGGCCAGG |
| | | | | GGACCAAGCTGGAGATCAAATCCGGAGGTGGTGGATCCGAGGTGCAGCTGGTCGAGTCTGGAGGA |
| | | | | GGATTGGTGCAGCCTGGAGGGTCATTGAAACTCTCATGTGCAGCCTCTGGATTCACCTTCAATAA |
| | | | | GTACGCCATGAACTGGGTCCGCCAGGCTCCAGGAAAGGGTTTGGAATGGGTTGCTCGCATAAGAA |
| | | | | GTAAATATAATAATTATGCAACATATTATGCCGATTCAGTGAAAGACAGGTTCACCATCTCCAGA |
| | | | | GATGATTCAAAAAACACTGCCTATCTACAAATGAACAACTTGAAAACTGAGGACACTGCCGTGTA |
| | | | | CTACTGTGTGAGACATGGGAACTTCGGTAATAGCTACATATCCTACTGGGCTTACTGGGGCCAAG |
| | | | | GGACTCTGGTCACCGTCTCCTCAGGTGGTGGTGGTTCTGGCGGCGGCGGCTCCGGTGGTGGTGGT |
| | | | | TCTCAGACTGTTGTGACTCAGGAACCTTCACTCACCGTATCACCTGGTGGAACAGTCACACTCAC |
| | | | | TTGTGGCTCCTCGACTGGGGCTGTTACATCTGGCAACTACCCAAACTGGGTCCAACAAAAACCAG |
| | | | | GTCAGGCACCCCGTGGTCTAATAGGTGGGACTAAGTTCCTCGCCCCCGGTACTCCTGCCAGATTC |
| | | | | TCAGGCTCCCTGCTTGGAGGCAAGGCTGCCCTCACCCTCTCAGGGGTACAGCCAGAGGATGAGGC |
| | | | | AGAATATTACTGTGTTCTATGGTACAGCAACCGCTGGGTGTTCGGTGGAGGAACCAAACTGACTG |
| | | | | TCCTA |
| 323. | MCSP-C8 HL x | artificial | aa | QVQLVQSGAEVKRPGASMKVSCKASGYTFTNYYIHWVRQAPGQGLEWMGWINPNSGATNYAQKFQ |
| | I2C HL | | | GRVTMTRDTSTSTVYMELSSLRSEDTAVYYCAKSWVSWFASWGQGTLVTVSSGGGGSGGGGSGGG |
| | | | | GSDIVMTQSPDSLAVSLGERATINCKSSQSVLNSKNNRNYLAWYQQKPGQPPKLLIYWASTRESG |
| | | | | VPDRFSGSGSGTDFTLTISGLQAEDVAVYYCQQHYSTPFTFGPGTKVDIKSGGGGSEVQLVESGG |
| | | | | GLVQPGGSLKLSCAASGFTFNKYAMNWVRQAPGKGLEWVARIRSKYNNYATYYADSVKDRFTISR |
| | | | | DDSKNTAYLQMNNLKTEDTAVYYCVRHGNFGNSYISYWAYWGQGTLVTVSSGGGGSGGGGSGGGG |
| | | | | SQTVVTQEPSLTVSPGGTVTLTCGSSTGAVTSGNYPNWVQQKPGQAPRGLIGGTKFLAPGTPARF |
| | | | | SGSLLGGKAALTLSGVQPEDEAEYYCVLWYSNRWVFGGGTKLTVL |
| 324. | MCSP-C8 HL x | artificial | nt | CAGGTGCAGCTGGTCCAGTCTGGGGCTGAGGTGAAGAGGCCTGGGGCCTCAATGAAGGTCTCCTG |
| | I2C HL | | | CAAGGCTTCTGGGTACACCTTCACCAACTACTATATACACTGGGTGCGACAGGCCCCTGGACAAG |
| | | | | GTCTTGAGTGGATGGGTTGGATCAACCCTAACAGTGGTGCCACAAACTATGCACAGAAGTTCCAG |
| | | | | GGCAGAGTCACCATGACCAGGGACACGTCCACGAGCACAGTCTACATGGAGCTGAGCAGCCTGAG |
| | | | | ATCTGAGGACACGGCCGTGTATTACTGTGCGAAATCCTGGGTCTCCTGGTTTGCTTCCTGGGGTC |
| | | | | AAGGAACCTTGGTCACCGTCTCCTCAGGTGGTGGTGGTTCTGGCGGCGGCGGCTCCGGTGGTGGT |
| | | | | GGTTCTGACATCGTGATGACCCAGTCTCCAGACTCCCTGGCTGTGTCTCTGGGCGAGAGGGCCAC |
| | | | | CATCAACTGCAAGTCCAGCCAGAGTGTTTTAAACAGCAAGAACAATAGGAACTACTTAGCTTGGT |
| | | | | ACCAGCAGAAACCAGGACAGCCTCCTAAGCTGCTCATTTACTGGGCATCTACCCGGGAATCCGGG |
| | | | | GTCCCTGACCGATTCAGTGGCAGCGGGTCTGGGACAGATTTCACTCTCACCATCAGTGGCCTGCA |
| | | | | GGCTGAAGATGTGGCAGTTTATTACTGTCAGCAACATTATAGTACTCCATTCACTTTTGGCCCTG |
| | | | | GGACCAAAGTGGATATCAAATCCGGAGGTGGTGGATCCGAGGTGCAGCTGGTCGAGTCTGGAGGA |
| | | | | GGATTGGTGCAGCCTGGAGGGTCATTGAAACTCTCATGTGCAGCCTCTGGATTCACCTTCAATAA |
| | | | | GTACGCCATGAACTGGGTCCGCCAGGCTCCAGGAAAGGGTTTGGAATGGGTTGCTCGCATAAGAA |
| | | | | GTAAATATAATAATTATGCAACATATTATGCCGATTCAGTGAAAGACAGGTTCACCATCTCCAGA |
| | | | | GATGATTCAAAAAACACTGCCTATCTACAAATGAACAACTTGAAAACTGAGGACACTGCCGTGTA |
| | | | | CTACTGTGTGAGACATGGGAACTTCGGTAATAGCTACATATCCTACTGGGCTTACTGGGGCCAAG |
| | | | | GGACTCTGGTCACCGTCTCCTCAGGTGGTGGTGGTTCTGGCGGCGGCGGCTCCGGTGGTGGTGGT |
| | | | | TCTCAGACTGTTGTGACTCAGGAACCTTCACTCACCGTATCACCTGGTGGAACAGTCACACTCAC |
| | | | | TTGTGGCTCCTCGACTGGGGCTGTTACATCTGGCAACTACCCAAACTGGGTCCAACAAAAACCAG |
| | | | | GTCAGGCACCCCGTGGTCTAATAGGTGGGACTAAGTTCCTCGCCCCCGGTACTCCTGCCAGATTC |
| | | | | TCAGGCTCCCTGCTTGGAGGCAAGGCTGCCCTCACCCTCTCAGGGGTACAGCCAGAGGATGAGGC |
| | | | | AGAATATTACTGTGTTCTATGGTACAGCAACCGCTGGGTGTTCGGTGGAGGAACCAAACTGACTG |
| | | | | TCCTA |
| 325. | MCSP-B8 HL x | artificial | aa | QVQLVQSGAEVKRPGASMKVSCKASGYTFTNYYIHWVRQAPGQGLEWMGWINPNSGATNYAQKFQ |
| | I2C HL | | | GRVTMTRDTSTSTVYMELSSLRSEDTAVYYCAKSWVSWFASWGQGTLVTVSSGGGGSGGGGSGGG |
| | | | | GSDIVMTQSPDSLTVSPGERATINCKSSQSVLNSKNNRNYLAWYQQKPGQPPKLLIYWASTRESG |
| | | | | VPDRFSGSGSGTDFTLTIDSLQPEDSATYYCQQHYSTPFTFGQGTRLEIKSGGGGSEVQLVESGG |
| | | | | GLVQPGGSLKLSCAASGFTFNKYAMNWVRQAPGKGLEWVARIRSKYNNYATYYADSVKDRFTISR |
| | | | | DDSKNTAYLQMNNLKTEDTAVYYCVRHGNFGNSYISYWAYWGQGTLVTVSSGGGGSGGGGSGGGG |
| | | | | SQTVVTQEPSLTVSPGGTVTLTCGSSTGAVTSGNYPNWVQQKPGQAPRGLIGGTKFLAPGTPARF |
| | | | | SGSLLGGKAALTLSGVQPEDEAEYYCVLWYSNRWVFGGGTKLTVL |
| 326. | MCSP-B8 HL x | artificial | nt | CAGGTGCAGCTGGTCCAGTCTGGGGCTGAGGTGAAGAGGCCTGGGGCCTCAATGAAGGTCTCCTG |
| | I2C HL | | | CAAGGCTTCTGGGTACACCTTCACCAACTACTATATACACTGGGTGCGACAGGCCCCTGGACAAG |
| | | | | GTCTTGAGTGGATGGGTTGGATCAACCCTAACAGTGGTGCCACAAACTATGCACAGAAGTTCCAG |
| | | | | GGCAGAGTCACCATGACCAGGGACACGTCCACGAGCACAGTCTACATGGAGCTGAGCAGCCTGAG |
| | | | | ATCTGAGGACACGGCCGTGTATTACTGTGCGAAATCCTGGGTCTCCTGGTTTGCTTCCTGGGGTC |
| | | | | AAGGAACCTTGGTCACCGTCTCCTCAGGTGGTGGTGGTTCTGGCGGCGGCGGCTCCGGTGGTGGT |
| | | | | GGTTCTGACATCGTGATGACCCAGTCTCCAGACTCCCTGACTGTGTCTCCGGGCGAGAGGGCCAC |
| | | | | CATCAACTGCAAGTCCAGCCAGAGTGTTTTAAACAGCAAGAACAATAGGAACTACTTAGCTTGGT |
| | | | | ACCAGCAGAAACCAGGACAGCCTCCTAAGCTGCTCATTTACTGGGCATCTACCCGGGAATCCGGG |
| | | | | GTCCCTGACCGATTCAGTGGCAGCGGGTCTGGGACAGATTTCACTCTCACCATCGATTCCCTGCA |
| | | | | GCCTGAAGATAGTGCAACTTATTACTGTCAGCAACATTATAGTACTCCATTCACTTTTGGCCAGG |
| | | | | GGACCAGACTGGAGATCAAATCCGGAGGTGGTGGATCCGAGGTGCAGCTGGTCGAGTCTGGAGGA |
| | | | | GGATTGGTGCAGCCTGGAGGGTCATTGAAACTCTCATGTGCAGCCTCTGGATTCACCTTCAATAA |
| | | | | GTACGCCATGAACTGGGTCCGCCAGGCTCCAGGAAAGGGTTTGGAATGGGTTGCTCGCATAAGAA |
| | | | | GTAAATATAATAATTATGCAACATATTATGCCGATTCAGTGAAAGACAGGTTCACCATCTCCAGA |
| | | | | GATGATTCAAAAAACACTGCCTATCTACAAATGAACAACTTGAAAACTGAGGACACTGCCGTGTA |
| | | | | CTACTGTGTGAGACATGGGAACTTCGGTAATAGCTACATATCCTACTGGGCTTACTGGGGCCAAG |
| | | | | GGACTCTGGTCACCGTCTCCTCAGGTGGTGGTGGTTCTGGCGGCGGCGGCTCCGGTGGTGGTGGT |
| | | | | TCTCAGACTGTTGTGACTCAGGAACCTTCACTCACCGTATCACCTGGTGGAACAGTCACACTCAC |
| | | | | TTGTGGCTCCTCGACTGGGGCTGTTACATCTGGCAACTACCCAAACTGGGTCCAACAAAAACCAG |
| | | | | GTCAGGCACCCCGTGGTCTAATAGGTGGGACTAAGTTCCTCGCCCCCGGTACTCCTGCCAGATTC |
| | | | | TCAGGCTCCCTGCTTGGAGGCAAGGCTGCCCTCACCCTCTCAGGGGTACAGCCAGAGGATGAGGC |
| | | | | AGAATATTACTGTGTTCTATGGTACAGCAACCGCTGGGTGTTCGGTGGAGGAACCAAACTGACTG |
| | | | | TCCTA |
| 327. | MCSP-B7 HL x | artificial | aa | QVQLVQSGAEVKRPGASMKVSCKASGYTFTNYYIHWVRQAPGQGLEWMGWINPNSGATNYAQKFQ |
| | I2C HL | | | GRVTMTRDTSTSTVYMELSSLRSEDTAVYYCAKSWVSWFASWGQGTLVTVSSGGGGSGGGGSGGG |
| | | | | GSDIVMTQSPDSLTVSLGERTTINCKSSQSVLNSKNNRNYLAWYQQKPGQPPKLLIYWASTRESG |
| | | | | VPDRFSGSGSGTDFTLTIDSLQPEDIATYYCQQHYSTPFTFGQGTRLEIKSGGGGSEVQLVESGG |
| | | | | GLVQPGGSLKLSCAASGFTFNKYAMNWVRQAPGKGLEWVARIRSKYNNYATYYADSVKDRFTISR |
| | | | | DDSKNTAYLQMNNLKTEDTAVYYCVRHGNFGNSYISYWAYWGQGTLVTVSSGGGGSGGGGSGGGG |
| | | | | SQTVVTQEPSLTVSPGGTVTLTCGSSTGAVTSGNYPNWVQQKPGQAPRGLIGGTKFLAPGTPARF |
| | | | | SGSLLGGKAALTLSGVQPEDEAEYYCVLWYSNRWVFGGGTKLTVL |
| 328. | MCSP-B7 HL x | artificial | nt | CAGGTGCAGCTGGTCCAGTCTGGGGCTGAGGTGAAGAGGCCTGGGGCCTCAATGAAGGTCTCCTG |
| | I2C HL | | | CAAGGCTTCTGGGTACACCTTCACCAACTACTATATACACTGGGTGCGACAGGCCCCTGGACAAG |
| | | | | GTCTTGAGTGGATGGGTTGGATCAACCCTAACAGTGGTGCCACAAACTATGCACAGAAGTTCCAG |
| | | | | GGCAGAGTCACCATGACCAGGGACACGTCCACGAGCACAGTCTACATGGAGCTGAGCAGCCTGAG |
| | | | | ATCTGAGGACACGGCCGTGTATTACTGTGCGAAATCCTGGGTCTCCTGGTTTGCTTCCTGGGGTC |
| | | | | AAGGAACCTTGGTCACCGTCTCCTCAGGTGGTGGTGGTTCTGGCGGCGGCGGCTCCGGTGGTGGT |
| | | | | GGTTCTGACATCGTGATGACCCAGTCTCCAGACTCCCTGACTGTGTCTCTGGGCGAGAGGACCAC |
| | | | | CATCAACTGCAAGTCCAGCCAGAGTGTTTTAAACAGCAAGAACAATAGGAACTACTTAGCTTGGT |
| | | | | ACCAGCAGAAACCAGGACAGCCTCCTAAGCTGCTCATTTACTGGGCATCTACCCGGGAATCCGGG |
| | | | | GTCCCTGACCGATTCAGTGGCAGCGGGTCTGGGACAGATTTCACTCTCACCATCGATTCCCTGCA |
| | | | | GCCTGAAGATATTGCAACTTATTACTGTCAGCAACATTATAGTACTCCATTCACTTTTGGCCAGG |
| | | | | GGACCAGACTGGAGATCAAATCCGGAGGTGGTGGATCCGAGGTGCAGCTGGTCGAGTCTGGAGGA |
| | | | | GGATTGGTGCAGCCTGGAGGGTCATTGAAACTCTCATGTGCAGCCTCTGGATTCACCTTCAATAA |
| | | | | GTACGCCATGAACTGGGTCCGCCAGGCTCCAGGAAAGGGTTTGGAATGGGTTGCTCGCATAAGAA |
| | | | | GTAAATATAATAATTATGCAACATATTATGCCGATTCAGTGAAAGACAGGTTCACCATCTCCAGA |
| | | | | GATGATTCAAAAAACACTGCCTATCTACAAATGAACAACTTGAAAACTGAGGACACTGCCGTGTA |
| | | | | CTACTGTGTGAGACATGGGAACTTCGGTAATAGCTACATATCCTACTGGGCTTACTGGGGCCAAG |
| | | | | GGACTCTGGTCACCGTCTCCTCAGGTGGTGGTGGTTCTGGCGGCGGCGGCTCCGGTGGTGGTGGT |
| | | | | TCTCAGACTGTTGTGACTCAGGAACCTTCACTCACCGTATCACCTGGTGGAACAGTCACACTCAC |
| | | | | TTGTGGCTCCTCGACTGGGGCTGTTACATCTGGCAACTACCCAAACTGGGTCCAACAAAAACCAG |
| | | | | GTCAGGCACCCCGTGGTCTAATAGGTGGGACTAAGTTCCTCGCCCCCGGTACTCCTGCCAGATTC |
| | | | | TCAGGCTCCCTGCTTGGAGGCAAGGCTGCCCTCACCCTCTCAGGGGTACAGCCAGAGGATGAGGC |
| | | | | AGAATATTACTGTGTTCTATGGTACAGCAACCGCTGGGTGTTCGGTGGAGGAACCAAACTGACTG |
| | | | | TCCTA |
| 329. | MCSP-G8 HL x | artificial | aa | QVQLVQSGAEVKRPGASMKVSCKASGYTFTNYYIHWVRQAPGQGLEWMGWINPNSGATNYAQKFQ |
| | I2C HL | | | GRVTMTRDTSTSTVYMELSSLRSEDTAVYYCAKSWVSWFASWGQGTLVTVSSGGGGSGGGGSGGG |
| | | | | GSDIVMTQSPDSLTVSLGERATINCKSSQSVLNSKNNRNYLAWYQQKPGQPPKLLIYWASTRESG |
| | | | | VPDRFSGSGSGTDFTLTIDSLQPEDSATYYCQQHYSTPFTFGQGTRLEIKSGGGGSEVQLVESGG |
| | | | | GLVQPGGSLKLSCAASGFTFNKYAMNWVRQAPGKGLEWVARIRSKYNNYATYYADSVKDRFTISR |
| | | | | DDSKNTAYLQMNNLKTEDTAVYYCVRHGNFGNSYISYWAYWGQGTLVTVSSGGGGSGGGGSGGGG |
| | | | | SQTVVTQEPSLTVSPGGTVTLTCGSSTGAVTSGNYPNWVQQKPGQAPRGLIGGTKFLAPGTPARF |
| | | | | SGSLLGGKAALTLSGVQPEDEAEYYCVLWYSNRWVFGGGTKLTVL |
| 330. | MCSP-G8 HL x | artificial | nt | CAGGTGCAGCTGGTCCAGTCTGGGGCTGAGGTGAAGAGGCCTGGGGCCTCAATGAAGGTCTCCTG |
| | I2C HL | | | CAAGGCTTCTGGGTACACCTTCACCAACTACTATATACACTGGGTGCGACAGGCCCCTGGACAAG |
| | | | | GTCTTGAGTGGATGGGTTGGATCAACCCTAACAGTGGTGCCACAAACTATGCACAGAAGTTCCAG |
| | | | | GGCAGAGTCACCATGACCAGGGACACGTCCACGAGCACAGTCTACATGGAGCTGAGCAGCCTGAG |
| | | | | ATCTGAGGACACGGCCGTGTATTACTGTGCGAAATCCTGGGTCTCCTGGTTTGCTTCCTGGGGTC |
| | | | | AAGGAACCTTGGTCACCGTCTCCTCAGGTGGTGGTGGTTCTGGCGGCGGCGGCTCCGGTGGTGGT |
| | | | | GGTTCTGACATCGTGATGACCCAGTCTCCAGACTCCCTGACTGTGTCTCTGGGCGAGAGGGCCAC |
| | | | | CATCAACTGCAAGTCCAGCCAGAGTGTTTTAAACAGCAAGAACAATAGGAACTACTTAGCTTGGT |
| | | | | ACCAGCAGAAACCAGGACAGCCTCCTAAGCTGCTCATTTACTGGGCATCTACCCGGGAATCCGGG |
| | | | | GTCCCTGACCGATTCAGTGGCAGCGGGTCTGGGACAGATTTCACTCTCACCATCGATTCCCTGCA |
| | | | | GCCTGAAGATAGTGCAACTTATTACTGTCAGCAACATTATAGTACTCCATTCACTTTTGGCCAGG |
| | | | | GGACCAGACTGGAGATCAAATCCGGAGGTGGTGGATCCGAGGTGCAGCTGGTCGAGTCTGGAGGA |
| | | | | GGATTGGTGCAGCCTGGAGGGTCATTGAAACTCTCATGTGCAGCCTCTGGATTCACCTTCAATAA |
| | | | | GTACGCCATGAACTGGGTCCGCCAGGCTCCAGGAAAGGGTTTGGAATGGGTTGCTCGCATAAGAA |
| | | | | GTAAATATAATAATTATGCAACATATTATGCCGATTCAGTGAAAGACAGGTTCACCATCTCCAGA |
| | | | | GATGATTCAAAAAACACTGCCTATCTACAAATGAACAACTTGAAAACTGAGGACACTGCCGTGTA |
| | | | | CTACTGTGTGAGACATGGGAACTTCGGTAATAGCTACATATCCTACTGGGCTTACTGGGGCCAAG |
| | | | | GGACTCTGGTCACCGTCTCCTCAGGTGGTGGTGGTTCTGGCGGCGGCGGCTCCGGTGGTGGTGGT |
| | | | | TCTCAGACTGTTGTGACTCAGGAACCTTCACTCACCGTATCACCTGGTGGAACAGTCACACTCAC |
| | | | | TTGTGGCTCCTCGACTGGGGCTGTTACATCTGGCAACTACCCAAACTGGGTCCAACAAAAACCAG |
| | | | | GTCAGGCACCCCGTGGTCTAATAGGTGGGACTAAGTTCCTCGCCCCCGGTACTCCTGCCAGATTC |
| | | | | TCAGGCTCCCTGCTTGGAGGCAAGGCTGCCCTCACCCTCTCAGGGGTACAGCCAGAGGATGAGGC |
| | | | | AGAATATTACTGTGTTCTATGGTACAGCAACCGCTGGGTGTTCGGTGGAGGAACCAAACTGACTG |
| | | | | TCCTA |
| 331. | MCSP-D5 HL x | artificial | aa | QVQLVQSGAEVKRPGASMKVSCKASGYTFTNYYIHWVRQAPGQGLEWMGWINPNSGATNYAQKFQ |
| | I2C HL | | | GRVTMTRDTSTSTVYMELSSLRSEDTAVYYCAKSWVSWFASWGQGTLVTVSSGGGGSGGGGSGGG |
| | | | | GSDIVMTQSPDSLAVSLGERATINCKSSQSVLNSKNNRNYLAWYQQKPGQPPKLLIYWASTRESG |
| | | | | VPDRFSGSGSGTDFTLTIDSLQAEDSATYYCQQHYSTPFTFGQGTRLEIKSGGGGSEVQLVESGG |
| | | | | GLVQPGGSLKLSCAASGFTFNKYAMNWVRQAPGKGLEWVARIRSKYNNYATYYADSVKDRFTISR |
| | | | | DDSKNTAYLQMNNLKTEDTAVYYCVRHGNFGNSYISYWAYWGQGTLVTVSSGGGGSGGGGSGGGG |
| | | | | SQTVVTQEPSLTVSPGGTVTLTCGSSTGAVTSGNYPNWVQQKPGQAPRGLIGGTKFLAPGTPARF |
| | | | | SGSLLGGKAALTLSGVQPEDEAEYYCVLWYSNRWVFGGGTKLTVL |
| 332. | MCSP-D5 HL x | artificial | nt | CAGGTGCAGCTGGTCCAGTCTGGGGCTGAGGTGAAGAGGCCTGGGGCCTCAATGAAGGTCTCCTG |
| | I2C HL | | | CAAGGCTTCTGGGTACACCTTCACCAACTACTATATACACTGGGTGCGACAGGCCCCTGGACAAG |
| | | | | GTCTTGAGTGGATGGGTTGGATCAACCCTAACAGTGGTGCCACAAACTATGCACAGAAGTTCCAG |
| | | | | GGCAGAGTCACCATGACCAGGGACACGTCCACGAGCACAGTCTACATGGAGCTGAGCAGCCTGAG |
| | | | | ATCTGAGGACACGGCCGTGTATTACTGTGCGAAATCCTGGGTCTCCTGGTTTGCTTCCTGGGGTC |
| | | | | AAGGAACCTTGGTCACCGTCTCCTCAGGTGGTGGTGGTTCTGGCGGCGGCGGCTCCGGTGGTGGT |
| | | | | GGTTCTGACATCGTGATGACCCAGTCTCCAGACTCCCTGGCTGTGTCTCTGGGCGAGAGGGCCAC |
| | | | | CATCAACTGCAAGTCCAGCCAGAGTGTTTTAAACAGCAAGAACAATAGGAACTACTTAGCTTGGT |
| | | | | ACCAGCAGAAACCAGGACAGCCTCCTAAGCTGCTCATTTACTGGGCATCTACCCGGGAATCCGGG |
| | | | | GTCCCTGACCGATTCAGTGGCAGCGGGTCTGGGACAGATTTCACTCTCACCATCGATTCCCTGCA |
| | | | | GGCTGAAGATAGTGCAACTTATTACTGTCAGCAACATTATAGTACTCCATTCACTTTTGGCCAGG |
| | | | | GGACCAGACTGGAGATCAAATCCGGAGGTGGTGGATCCGAGGTGCAGCTGGTCGAGTCTGGAGGA |
| | | | | GGATTGGTGCAGCCTGGAGGGTCATTGAAACTCTCATGTGCAGCCTCTGGATTCACCTTCAATAA |
| | | | | GTACGCCATGAACTGGGTCCGCCAGGCTCCAGGAAAGGGTTTGGAATGGGTTGCTCGCATAAGAA |
| | | | | GTAAATATAATAATTATGCAACATATTATGCCGATTCAGTGAAAGACAGGTTCACCATCTCCAGA |
| | | | | GATGATTCAAAAAACACTGCCTATCTACAAATGAACAACTTGAAAACTGAGGACACTGCCGTGTA |
| | | | | CTACTGTGTGAGACATGGGAACTTCGGTAATAGCTACATATCCTACTGGGCTTACTGGGGCCAAG |
| | | | | GGACTCTGGTCACCGTCTCCTCAGGTGGTGGTGGTTCTGGCGGCGGCGGCTCCGGTGGTGGTGGT |
| | | | | TCTCAGACTGTTGTGACTCAGGAACCTTCACTCACCGTATCACCTGGTGGAACAGTCACACTCAC |
| | | | | TTGTGGCTCCTCGACTGGGGCTGTTACATCTGGCAACTACCCAAACTGGGTCCAACAAAAACCAG |
| | | | | GTCAGGCACCCCGTGGTCTAATAGGTGGGACTAAGTTCCTCGCCCCCGGTACTCCTGCCAGATTC |
| | | | | TCAGGCTCCCTGCTTGGAGGCAAGGCTGCCCTCACCCTCTCAGGGGTACAGCCAGAGGATGAGGC |
| | | | | AGAATATTACTGTGTTCTATGGTACAGCAACCGCTGGGTGTTCGGTGGAGGAACCAAACTGACTG |
| | | | | TCCTA |
| 333. | MCSP-F7 HL x | artificial | aa | QVQLVQSGAEVKRPGASMKVSCKASGYTFTNYYIHWVRQAPGQGLEWMGWINPNSGATNYAQKFQ |
| | I2C HL | | | GRVTMTRDTSTSTVYMELSSLRSEDTAVYYCAKSWVSWFASWGQGTLVTVSSGGGGSGGGGSGGG |
| | | | | GSDIVMTQSPDSLAVSLGERATINCKSSQSVLNSKNNRNYLAWYQQKPGQPPKLLIYWASTRESG |
| | | | | VPDRFSGSGSGTDFTLTIDVLQPEDIATYYCQQHYSTPFTFGQGTRLEIKSGGGGSEVQLVESGG |
| | | | | GLVQPGGSLKLSCAASGFTFNKYAMNWVRQAPGKGLEWVARIRSKYNNYATYYADSVKDRFTISR |
| | | | | DDSKNTAYLQMNNLKTEDTAVYYCVRHGNFGNSYISYWAYWGQGTLVTVSSGGGGSGGGGSGGGG |
| | | | | SQTVVTQEPSLTVSPGGTVTLTCGSSTGAVTSGNYPNWVQQKPGQAPRGLIGGTKFLAPGTPARF |
| | | | | SGSLLGGKAALTLSGVQPEDEAEYYCVLWYSNRWVFGGGTKLTVL |
| 334. | MCSP-F7 HL x | artificial | nt | CAGGTGCAGCTGGTCCAGTCTGGGGCTGAGGTGAAGAGGCCTGGGGCCTCAATGAAGGTCTCCTG |
| | I2C HL | | | CAAGGCTTCTGGGTACACCTTCACCAACTACTATATACACTGGGTGCGACAGGCCCCTGGACAAG |
| | | | | GTCTTGAGTGGATGGGTTGGATCAACCCTAACAGTGGTGCCACAAACTATGCACAGAAGTTCCAG |
| | | | | GGCAGAGTCACCATGACCAGGGACACGTCCACGAGCACAGTCTACATGGAGCTGAGCAGCCTGAG |
| | | | | ATCTGAGGACACGGCCGTGTATTACTGTGCGAAATCCTGGGTCTCCTGGTTTGCTTCCTGGGGTC |
| | | | | AAGGAACCTTGGTCACCGTCTCCTCAGGTGGTGGTGGTTCTGGCGGCGGCGGCTCCGGTGGTGGT |
| | | | | GGTTCTGACATCGTGATGACCCAGTCTCCAGACTCCCTGGCTGTGTCTCTGGGCGAGAGGGCCAC |
| | | | | CATCAACTGCAAGTCCAGCCAGAGTGTTTTAAACAGCAAGAACAATAGGAACTACTTAGCTTGGT |
| | | | | ACCAGCAGAAACCAGGACAGCCTCCTAAGCTGCTCATTTACTGGGCATCTACCCGGGAATCCGGG |
| | | | | GTCCCTGACCGATTCAGTGGCAGCGGGTCTGGGACAGATTTCACTCTCACCATCGATGTCCTGCA |
| | | | | GCCTGAAGATATTGCAACTTATTACTGTCAGCAACATTATAGTACTCCATTCACTTTTGGCCAGG |
| | | | | GGACCAGACTGGAGATCAAATCCGGAGGTGGTGGATCCGAGGTGCAGCTGGTCGAGTCTGGAGGA |
| | | | | GGATTGGTGCAGCCTGGAGGGTCATTGAAACTCTCATGTGCAGCCTCTGGATTCACCTTCAATAA |
| | | | | GTACGCCATGAACTGGGTCCGCCAGGCTCCAGGAAAGGGTTTGGAATGGGTTGCTCGCATAAGAA |
| | | | | GTAAATATAATAATTATGCAACATATTATGCCGATTCAGTGAAAGACAGGTTCACCATCTCCAGA |
| | | | | GATGATTCAAAAAACACTGCCTATCTACAAATGAACAACTTGAAAACTGAGGACACTGCCGTGTA |
| | | | | CTACTGTGTGAGACATGGGAACTTCGGTAATAGCTACATATCCTACTGGGCTTACTGGGGCCAAG |
| | | | | GGACTCTGGTCACCGTCTCCTCAGGTGGTGGTGGTTCTGGCGGCGGCGGCTCCGGTGGTGGTGGT |
| | | | | TCTCAGACTGTTGTGACTCAGGAACCTTCACTCACCGTATCACCTGGTGGAACAGTCACACTCAC |
| | | | | TTGTGGCTCCTCGACTGGGGCTGTTACATCTGGCAACTACCCAAACTGGGTCCAACAAAAACCAG |
| | | | | GTCAGGCACCCCGTGGTCTAATAGGTGGGACTAAGTTCCTCGCCCCCGGTACTCCTGCCAGATTC |
| | | | | TCAGGCTCCCTGCTTGGAGGCAAGGCTGCCCTCACCCTCTCAGGGGTACAGCCAGAGGATGAGGC |
| | | | | AGAATATTACTGTGTTCTATGGTACAGCAACCGCTGGGTGTTCGGTGGAGGAACCAAACTGACTG |
| | | | | TCCTA |
| 335. | MCSP-G5 HL x | artificial | aa | QVQLVQSGAEVKRPGASMKVSCKASGYTFTNYYIHWVRQAPGQGLEWMGWINPNSGATNYAQKFQ |
| | I2C HL | | | GRVTMTRDTSTSTVYMELSSLRSEDTAVYYCAKSWVSWFASWGQGTLVTVSSGGGGSGGGGSGGG |
| | | | | GSDIVMTQSPDSLAVSLGDRATINCKSSQSVLNSKNNRNYLAWYQQKPGQPPKLLIYWASTRESG |
| | | | | VPDRFSGSGSGTDFTLTIDSLQPEDSATYYCQQHYSTPFTFGQGTRLEIKSGGGGSEVQLVESGG |
| | | | | GLVQPGGSLKLSCAASGFTFNKYAMNWVRQAPGKGLEWVARIRSKYNNYATYYADSVKDRFTISR |
| | | | | DDSKNTAYLQMNNLKTEDTAVYYCVRHGNFGNSYISYWAYWGQGTLVTVSSGGGGSGGGGSGGGG |
| | | | | SQTVVTQEPSLTVSPGGTVTLTCGSSTGAVTSGNYPNWVQQKPGQAPRGLIGGTKFLAPGTPARF |
| | | | | SGSLLGGKAALTLSGVQPEDEAEYYCVLWYSNRWVFGGGTKLTVL |
| 336. | MCSP-G5 HL x | artificial | nt | CAGGTGCAGCTGGTCCAGTCTGGGGCTGAGGTGAAGAGGCCTGGGGCCTCAATGAAGGTCTCCTG |
| | I2C HL | | | CAAGGCTTCTGGGTACACCTTCACCAACTACTATATACACTGGGTGCGACAGGCCCCTGGACAAG |
| | | | | GTCTTGAGTGGATGGGTTGGATCAACCCTAACAGTGGTGCCACAAACTATGCACAGAAGTTCCAG |
| | | | | GGCAGAGTCACCATGACCAGGGACACGTCCACGAGCACAGTCTACATGGAGCTGAGCAGCCTGAG |
| | | | | ATCTGAGGACACGGCCGTGTATTACTGTGCGAAATCCTGGGTCTCCTGGTTTGCTTCCTGGGGTC |
| | | | | AAGGAACCTTGGTCACCGTCTCCTCAGGTGGTGGTGGTTCTGGCGGCGGCGGCTCCGGTGGTGGT |
| | | | | GGTTCTGACATCGTGATGACCCAGTCTCCAGACTCCCTGGCTGTGTCTCTGGGCGACAGGGCCAC |
| | | | | CATCAACTGCAAGTCCAGCCAGAGTGTTTTAAACAGCAAGAACAATAGGAACTACTTAGCTTGGT |
| | | | | ACCAGCAGAAACCAGGACAGCCTCCTAAGCTGCTCATTTACTGGGCATCTACCCGGGAATCCGGG |
| | | | | GTCCCTGACCGATTCAGTGGCAGCGGGTCTGGGACAGATTTCACTCTCACCATCGATTCCCTGCA |
| | | | | GCCTGAGGATAGTGCAACTTATTACTGTCAGCAACATTATAGTACTCCATTCACTTTTGGCCAGG |
| | | | | GGACCAGACTGGAGATCAAATCCGGAGGTGGTGGATCCGAGGTGCAGCTGGTCGAGTCTGGAGGA |
| | | | | GGATTGGTGCAGCCTGGAGGGTCATTGAAACTCTCATGTGCAGCCTCTGGATTCACCTTCAATAA |
| | | | | GTACGCCATGAACTGGGTCCGCCAGGCTCCAGGAAAGGGTTTGGAATGGGTTGCTCGCATAAGAA |
| | | | | GTAAATATAATAATTATGCAACATATTATGCCGATTCAGTGAAAGACAGGTTCACCATCTCCAGA |
| | | | | GATGATTCAAAAAACACTGCCTATCTACAAATGAACAACTTGAAAACTGAGGACACTGCCGTGTA |
| | | | | CTACTGTGTGAGACATGGGAACTTCGGTAATAGCTACATATCCTACTGGGCTTACTGGGGCCAAG |
| | | | | GGACTCTGGTCACCGTCTCCTCAGGTGGTGGTGGTTCTGGCGGCGGCGGCTCCGGTGGTGGTGGT |
| | | | | TCTCAGACTGTTGTGACTCAGGAACCTTCACTCACCGTATCACCTGGTGGAACAGTCACACTCAC |
| | | | | TTGTGGCTCCTCGACTGGGGCTGTTACATCTGGCAACTACCCAAACTGGGTCCAACAAAAACCAG |
| | | | | GTCAGGCACCCCGTGGTCTAATAGGTGGGACTAAGTTCCTCGCCCCCGGTACTCCTGCCAGATTC |
| | | | | TCAGGCTCCCTGCTTGGAGGCAAGGCTGCCCTCACCCTCTCAGGGGTACAGCCAGAGGATGAGGC |
| | | | | AGAATATTACTGTGTTCTATGGTACAGCAACCGCTGGGTGTTCGGTGGAGGAACCAAACTGACTG |
| | | | | TCCTA |
| 337. | MCSP-F8 HL x | artificial | aa | QVQLVQSGAEVKRPGASMKVSCKASGYTFTNYYIHWVRQAPGQGLEWMGWINPNSGATNYAQKFQ |
| | I2C HL | | | GRVTMTRDTSTSTVYMELSSLRSEDTAVYYCAKSWVSWFASWGQGTLVTVSSGGGGSGGGGSGGG |
| | | | | GSDIVMTQSPDSLTVSLGERATINCKSSQSVLNSKNNRNYLAWYQQKPGQPPKLLIYWASTRESG |
| | | | | VPDRFSGSGSGTDFTLTIDSLQAEDSAIYYCQQHYSTPFTFGQGTRLEIKSGGGGSEVQLVESGG |
| | | | | GLVQPGGSLKLSCAASGFTFNKYAMNWVRQAPGKGLEWVARIRSKYNNYATYYADSVKDRFTISR |
| | | | | DDSKNTAYLQMNNLKTEDTAVYYCVRHGNFGNSYISYWAYWGQGTLVTVSSGGGGSGGGGSGGGG |
| | | | | SQTVVTQEPSLTVSPGGTVTLTCGSSTGAVTSGNYPNWVQQKPGQAPRGLIGGTKFLAPGTPARF |
| | | | | SGSLLGGKAALTLSGVQPEDEAEYYCVLWYSNRWVFGGGTKLTVL |
| 338. | MCSP-F8 HL x | artificial | nt | CAGGTGCAGCTGGTCCAGTCTGGGGCTGAGGTGAAGAGGCCTGGGGCCTCAATGAAGGTCTCCTG |
| | I2C HL | | | CAAGGCTTCTGGGTACACCTTCACCAACTACTATATACACTGGGTGCGACAGGCCCCTGGACAAG |
| | | | | GTCTTGAGTGGATGGGTTGGATCAACCCTAACAGTGGTGCCACAAACTATGCACAGAAGTTCCAG |
| | | | | GGCAGAGTCACCATGACCAGGGACACGTCCACGAGCACAGTCTACATGGAGCTGAGCAGCCTGAG |
| | | | | ATCTGAGGACACGGCCGTGTATTACTGTGCGAAATCCTGGGTCTCCTGGTTTGCTTCCTGGGGTC |
| | | | | AAGGAACCTTGGTCACCGTCTCCTCAGGTGGTGGTGGTTCTGGCGGCGGCGGCTCCGGTGGTGGT |
| | | | | GGTTCTGACATCGTGATGACCCAGTCTCCAGACTCCCTGACTGTGTCTCTGGGCGAGAGGGCCAC |
| | | | | CATCAACTGCAAGTCCAGCCAGAGTGTTTTAAACAGCAAGAACAATAGGAACTACTTAGCTTGGT |
| | | | | ACCAGCAGAAACCAGGACAGCCTCCTAAGCTGCTCATTTACTGGGCATCTACCCGGGAATCCGGG |
| | | | | GTCCCTGACCGATTCAGTGGCAGCGGGTCTGGGACAGATTTCACTCTCACCATCGATTCCCTGCA |
| | | | | GGCTGAAGATAGTGCAATTTATTACTGTCAGCAACATTATAGTACTCCATTCACTTTTGGCCAGG |
| | | | | GGACCAGACTGGAGATCAAATCCGGAGGTGGTGGATCCGAGGTGCAGCTGGTCGAGTCTGGAGGA |
| | | | | GGATTGGTGCAGCCTGGAGGGTCATTGAAACTCTCATGTGCAGCCTCTGGATTCACCTTCAATAA |
| | | | | GTACGCCATGAACTGGGTCCGCCAGGCTCCAGGAAAGGGTTTGGAATGGGTTGCTCGCATAAGAA |
| | | | | GTAAATATAATAATTATGCAACATATTATGCCGATTCAGTGAAAGACAGGTTCACCATCTCCAGA |
| | | | | GATGATTCAAAAAACACTGCCTATCTACAAATGAACAACTTGAAAACTGAGGACACTGCCGTGTA |
| | | | | CTACTGTGTGAGACATGGGAACTTCGGTAATAGCTACATATCCTACTGGGCTTACTGGGGCCAAG |
| | | | | GGACTCTGGTCACCGTCTCCTCAGGTGGTGGTGGTTCTGGCGGCGGCGGCTCCGGTGGTGGTGGT |
| | | | | TCTCAGACTGTTGTGACTCAGGAACCTTCACTCACCGTATCACCTGGTGGAACAGTCACACTCAC |
| | | | | TTGTGGCTCCTCGACTGGGGCTGTTACATCTGGCAACTACCCAAACTGGGTCCAACAAAAACCAG |
| | | | | GTCAGGCACCCCGTGGTCTAATAGGTGGGACTAAGTTCCTCGCCCCCGGTACTCCTGCCAGATTC |
| | | | | TCAGGCTCCCTGCTTGGAGGCAAGGCTGCCCTCACCCTCTCAGGGGTACAGCCAGAGGATGAGGC |
| | | | | AGAATATTACTGTGTTCTATGGTACAGCAACCGCTGGGTGTTCGGTGGAGGAACCAAACTGACTG |
| | | | | TCCTA |
| 339. | MCSP-G10 HL x | artificial | aa | QVQLVQSGAEVKRPGASMKVSCKASGYTFTNYYIHWVRQAPGQGLEWMGWINPNSGATNYAQKFQ |
| | I2C HL | | | GRVTMTRDTSTSTVYMELSSLRSEDTAVYYCAKSWVSWFASWGQGTLVTVSSGGGGSGGGGSGGG |
| | | | | GSDIVMTQSPDSLAVSLGERATINCKSSQSVLSSSNNKNYLNWYQQKPGQPPKLLIYWASTRESG |
| | | | | VPDRFSGSGSGTDFTLTISSLQAEDVAVYYCQQHFNTPFAFGQGTKLEIKSGGGGSEVQLVESGG |
| | | | | GLVQPGGSLKLSCAASGFTFNKYAMNWVRQAPGKGLEWVARIRSKYNNYATYYADSVKDRFTISR |
| | | | | DDSKNTAYLQMNNLKTEDTAVYYCVRHGNFGNSYISYWAYWGQGTLVTVSSGGGGSGGGGSGGGG |
| | | | | SQTVVTQEPSLTVSPGGTVTLTCGSSTGAVTSGNYPNWVQQKPGQAPRGLIGGTKFLAPGTPARF |
| | | | | SGSLLGGKAALTLSGVQPEDEAEYYCVLWYSNRWVFGGGTKLTVL |
| 340. | MCSP-G10 HL x | artificial | nt | CAGGTGCAGCTGGTCCAGTCTGGGGCTGAGGTGAAGAGGCCTGGGGCCTCAATGAAGGTCTCCTG |
| | I2C HL | | | CAAGGCTTCTGGGTACACCTTCACCAACTACTATATACACTGGGTGCGACAGGCCCCTGGACAAG |
| | | | | GTCTTGAGTGGATGGGTTGGATCAACCCTAACAGTGGTGCCACAAACTATGCACAGAAGTTCCAG |
| | | | | GGCAGAGTCACCATGACCAGGGACACGTCCACGAGCACAGTCTACATGGAGCTGAGCAGCCTGAG |
| | | | | ATCTGAGGACACGGCCGTGTATTACTGTGCGAAATCCTGGGTCTCCTGGTTTGCTTCCTGGGGTC |
| | | | | AAGGAACCTTGGTCACCGTCTCCTCAGGTGGTGGTGGTTCTGGCGGCGGCGGCTCCGGTGGTGGT |
| | | | | GGTTCTGACATCGTGATGACACAGTCTCCAGACTCCCTGGCTGTGTCTCTGGGCGAGAGGGCCAC |
| | | | | CATCAACTGCAAGTCCAGCCAGAGTGTCTTATCCAGCTCCAACAATAAGAACTACTTAAATTGGT |
| | | | | ACCAGCAGAAACCAGGACAGCCTCCTAAGTTGCTCATTTACTGGGCATCTACCCGGGAATCCGGG |
| | | | | GTCCCTGACCGATTCAGTGGCAGCGGGTCTGGGACAGATTTCACTCTCACCATCAGCAGCCTGCA |
| | | | | GGCTGAAGATGTGGCGGTTTATTACTGTCAACAACATTTTAATACTCCGTTCGCTTTTGGCCAGG |
| | | | | GGACCAAGCTGGAGATCAAATCCGGAGGTGGTGGATCCGAGGTGCAGCTGGTCGAGTCTGGAGGA |
| | | | | GGATTGGTGCAGCCTGGAGGGTCATTGAAACTCTCATGTGCAGCCTCTGGATTCACCTTCAATAA |
| | | | | GTACGCCATGAACTGGGTCCGCCAGGCTCCAGGAAAGGGTTTGGAATGGGTTGCTCGCATAAGAA |
| | | | | GTAAATATAATAATTATGCAACATATTATGCCGATTCAGTGAAAGACAGGTTCACCATCTCCAGA |
| | | | | GATGATTCAAAAAACACTGCCTATCTACAAATGAACAACTTGAAAACTGAGGACACTGCCGTGTA |
| | | | | CTACTGTGTGAGACATGGGAACTTCGGTAATAGCTACATATCCTACTGGGCTTACTGGGGCCAAG |
| | | | | GGACTCTGGTCACCGTCTCCTCAGGTGGTGGTGGTTCTGGCGGCGGCGGCTCCGGTGGTGGTGGT |
| | | | | TCTCAGACTGTTGTGACTCAGGAACCTTCACTCACCGTATCACCTGGTGGAACAGTCACACTCAC |
| | | | | TTGTGGCTCCTCGACTGGGGCTGTTACATCTGGCAACTACCCAAACTGGGTCCAACAAAAACCAG |
| | | | | GTCAGGCACCCCGTGGTCTAATAGGTGGGACTAAGTTCCTCGCCCCCGGTACTCCTGCCAGATTC |
| | | | | TCAGGCTCCCTGCTTGGAGGCAAGGCTGCCCTCACCCTCTCAGGGGTACAGCCAGAGGATGAGGC |
| | | | | AGAATATTACTGTGTTCTATGGTACAGCAACCGCTGGGTGTTCGGTGGAGGAACCAAACTGACTG |
| | | | | TCCTA |
| 341. | Human | human | aa | QDGNEEMG |
| | CD3ε 1-8 | | | |
| | (N-terminus) | | | |
| 342. | Saimiri | Saimiri | aa | QDGNEEIG |
| | sciureus CD3ε | sciureus | | |
| | 1-8 | | | |
| | (N-terminus) | | | |
| 343. | Thioate- | artificial | nt | TCCATGACGTTCCTGATGCT |
| | modified | | | |
| | CpG- | | | |
| | Oligo- | | | |
| | nucleotide | | | |
| 344. | MVH1 | artificial | nt | (GC) AGGTGCAGCTCGAGGAGTCAGGACCT |
| 345. | MVH2 | artificial | nt | GAGGTCCAGCTCGAGCAGTCTGGACCT |
| 346. | MVH3 | artificial | nt | CAGGTCCAACTCGAGCAGCCTGGGGCT |
| 347. | MVH4 | artificial | nt | GAGGTTCAGCTCGAGCAGTCTGGGGCA |
| 348. | MVH5 | artificial | nt | GA(AG)GTGAAGCTCGAGGAGTCTGGAGGA |
| 349. | MVH6 | artificial | nt | GAGGTGAAGCTTCTCGAGTCTGGAGGT |
| 350. | MVH7 | artificial | nt | GAAGTGAAGCTCGAGGAGTCTGGGGGA |
| 351. | MVH8 | artificial | nt | GAGGTTCAGCTCGAGCAGTCTGGAGCT |
| 352. | MuVHBstEII | artificial | nt | TGAGGAGACGGTGACCGTGGTCCCTTGGCCCCAG |
| 353. | MUVK1 | artificial | nt | CCAGTTCCGAGCTCGTTGTGACTCAGGAATCT |
| 354. | MUVK2 | artificial | nt | CCAGTTCCGAGCTCGTGTTGACGCAGCCGCCC |
| 355. | MUVK3 | artificial | nt | CCAGTTCCGAGCTCGTGCTCACCCAGTCTCCA |
| 356. | MUVK4 | artificial | nt | CCAGTTCCGAGCTCCAGATGACCCAGTCTCCA |
| 357. | MUVK5 | artificial | nt | CCAGATGTGAGCTCGTGATGACCCAGACTCCA |
| 358. | MUVK6 | artificial | nt | CCAGATGTGAGCTCGTCATGACCCAGTCTCCA |
| 359. | MUVK7 | artificial | nt | CCAGTTCCGAGCTCGTGATGACACAGTCTCCA |
| 360. | MuVkHindIII/ | artificial | nt | TGGTGCACTAGTCGTACGTTTGATCTCAAGCTTGGTCCC |
| | BsiW1 | | | |
| 361. | forward primer | artificial | nt | GATCTGGTCTACACCATCGAGC |
| 362. | reverse primer | artificial | nt | GGAGCTGCTGCTGGCTCAGTGAGG |
| 363. | forward primer | artificial | nt | TTCCAGCTGAGCATGTCTGATGG |
| 364. | reverse primer | artificial | nt | CGATCAGCATCTGGGCCCAGG |
| 365. | forward primer | artificial | nt | GTGGAGCAGTTCACTCAGCAGGACC |
| 366. | reverse primer | artificial | nt | GCCTTCACACCCAGTACTGGCC |
| 367. | forward primer | artificial | nt | TCCCGTACGAGATCTGGATCCCAATTGGATGGCGGACTCGTGCTGTTCTCACACAGAGG |
| 368. | reverse primer | artificial | nt | AGTGGGTCGACTCACACCCAGTACTGGCCATTCTTAAGGGCAGGG |
| 369. | forward primer | artificial | nt | GAGGAATTCACCATGCCGCTGCTGCTACTGCTGCCCCTGCTGTGGGCAGGGGCCCTGGCTATGG |
| 370. | reverse primer | artificial | nt | GATTTGTAACTGTATTTGGTACTTCC |
| 371. | forward primer | artificial | nt | ATTCCGCCTCCTTGGGGATCC |
| 372. | reverse primer | artificial | nt | GCATAGGAGACATTGAGCTGGATGG |
| 373. | forward primer | artificial | nt | GCACCAACCTGACCTGTCAGG |
| 374. | reverse primer | artificial | nt | AGTGGGTCGACTCACTGGGTCCTGACCTCTGAGTATTCG |
| 375. | V EGFR 3D-E8 | artificial | aa | EVQLLESGGGLVQAGGSLRLSCAASGRTFSTYTMAWFRQAPGKEREFVQGISRSDGGTYDADSVK |
| | | | | GRFTISRDNAKNTVYLQMNSLKPEDTAVYFCAAASVKLVYVNPNRYSYWGQGTQVTVSS |
| 376. | V EGFR 3D-E8 | artificial | aa | TYTMA |
| | CDR1 | | | |
| 377. | V EGFR 3D-E8 | artificial | aa | GISRSDGGTYDADSVKG |
| | CDR2 | | | |
| 378. | V EGFR 3D-E8 | artificial | aa | ASVKLVYVNPNRYSY |
| | CDR3 | | | |
| 379. | EGFR 3D-E8 | artificial | nt | GAGGTGCAGCTGCTCGAGAGCGGTGGTGGTCTGGTTCAGGCGGGTGGCAGCCTGCGTCTGAGCTG |
| | | | | TGCGGCGAGCGGCCGTACCTTTAGCACCTATACCATGGCGTGGTTTCGTCAGGCACCGGGCAAAG |
| | | | | AACGTGAATTTGTGCAGGGCATTAGCCGTAGCGATGGCGGCACCTATGATGCGGATAGCGTGAAA |
| | | | | GGCCGTTTTACCATTAGCCGTGATAACGCGAAAAACACCGTGTATCTGCAGATGAACAGCCTGAA |
| | | | | ACCGGAAGATACCGCGGTGTATTTTTGCGCGGCAGCGAGCGTGAAACTGGTGTATGTGAATCCGA |
| | | | | ACCGTTATAGCTATTGGGGCCAGGGCACCCAGGTGACCGTTAGCTCC |
| 380. | EGFR 3D-E8 x | artificial | aa | EVQLLESGGGLVQAGGSLRLSCAASGRTFSTYTMAWFRQAPGKEREFVQGISRSDGGTYDADSVK |
| | I2C HL | | | GRFTISRDNAKNTVYLQMNSLKPEDTAVYFCAAASVKLVYVNPNRYSYWGQGTQVTVSSGGGGSE |
| | | | | VQLVESGGGLVQPGGSLKLSCAASGFTFNKYAMNWVRQAPGKGLEWVARIRSKYNNYATYYADSV |
| | | | | KDRFTISRDDSKNTAYLQMNNLKTEDTAVYYCVRHGNFGNSYISYWAYWGQGTLVTVSSGGGGSG |
| | | | | GGGSGGGGSQTVVTQEPSLTVSPGGTVTLTCGSSTGAVTSGNYPNWVQQKPGQAPRGLIGGTKFL |
| | | | | APGTPARFSGSLLGGKAALTLSGVQPEDEAEYYCVLWYSNRWVFGGGTKLTVL |
| 381. | EGFR 3D-E8 x | artificial | nt | GAGGTGCAGCTGCTCGAGAGCGGTGGTGGTCTGGTTCAGGCGGGTGGCAGCCTGCGTCTGAGCTG |
| | I2C HL | | | TGCGGCGAGCGGCCGTACCTTTAGCACCTATACCATGGCGTGGTTTCGTCAGGCACCGGGCAAAG |
| | | | | AACGTGAATTTGTGCAGGGCATTAGCCGTAGCGATGGCGGCACCTATGATGCGGATAGCGTGAAA |
| | | | | GGCCGTTTTACCATTAGCCGTGATAACGCGAAAAACACCGTGTATCTGCAGATGAACAGCCTGAA |
| | | | | ACCGGAAGATACCGCGGTGTATTTTTGCGCGGCAGCGAGCGTGAAACTGGTGTATGTGAATCCGA |
| | | | | ACCGTTATAGCTATTGGGGCCAGGGCACCCAGGTGACCGTTAGCTCCGGAGGTGGTGGATCCGAG |
| | | | | GTGCAGCTGGTCGAGTCTGGAGGAGGATTGGTGCAGCCTGGAGGGTCATTGAAACTCTCATGTGC |
| | | | | AGCCTCTGGATTCACCTTCAATAAGTACGCCATGAACTGGGTCCGCCAGGCTCCAGGAAAGGGTT |
| | | | | TGGAATGGGTTGCTCGCATAAGAAGTAAATATAATAATTATGCAACATATTATGCCGATTCAGTG |
| | | | | AAAGACAGGTTCACCATCTCCAGAGATGATTCAAAAAACACTGCCTATCTACAAATGAACAACTT |
| | | | | GAAAACTGAGGACACTGCCGTGTACTACTGTGTGAGACATGGGAACTTCGGTAATAGCTACATAT |
| | | | | CCTACTGGGCTTACTGGGGCCAAGGGACTCTGGTCACCGTCTCCTCAGGTGGTGGTGGTTCTGGC |
| | | | | GGCGGCGGCTCCGGTGGTGGTGGTTCTCAGACTGTTGTGACTCAGGAACCTTCACTCACCGTATC |
| | | | | ACCTGGTGGAACAGTCACACTCACTTGTGGCTCCTCGACTGGGGCTGTTACATCTGGCAACTACC |
| | | | | CAAACTGGGTCCAACAAAAACCAGGTCAGGCACCCCGTGGTCTAATAGGTGGGACTAAGTTCCTC |
| | | | | GCCCCCGGTACTCCTGCCAGATTCTCAGGCTCCCTGCTTGGAGGCAAGGCTGCCCTCACCCTCTC |
| | | | | AGGGGTACAGCCAGAGGATGAGGCAGAATATTACTGTGTTCTATGGTACAGCAACCGCTGGGTGT |
| | | | | TCGGTGGAGGAACCAAACTGACTGTCCTA |
| 382. | EGFR 3D-E8 x | artificial | aa | EVQLLESGGGLVQAGGSLRLSCAASGRTFSTYTMAWFRQAPGKEREFVQGISRSDGGTYDADSVK |
| | H2C HL | | | GRFTISRDNAKNTVYLQMNSLKPEDTAVYFCAAASVKLVYVNPNRYSYWGQGTQVTVSSGGGGSE |
| | | | | VQLVESGGGLVQPGGSLKLSCAASGFTFNKYAMNWVRQAPGKGLEWVARIRSKYNNYATYYADSV |
| | | | | KDRFTISRDDSKNTAYLQMNNLKTEDTAVYYCVRHGNFGNSYISYWAYWGQGTLVTVSSGGGGSG |
| | | | | GGGSGGGGSQTVVTQEPSLTVSPGGTVTLTCGSSTGAVTSGYYPNWVQQKPGQAPRGLIGGTKFL |
| | | | | APGTPARFSGSLLGGKAALTLSGVQPEDEAEYYCALWYSNRWVFGGGTKLTVL |
| 383. | EGFR 3D-E8 x | artificial | nt | GAGGTGCAGCTGCTCGAGAGCGGTGGTGGTCTGGTTCAGGCGGGTGGCAGCCTGCGTCTGAGCTG |
| | H2C HL | | | TGCGGCGAGCGGCCGTACCTTTAGCACCTATACCATGGCGTGGTTTCGTCAGGCACCGGGCAAAG |
| | | | | AACGTGAATTTGTGCAGGGCATTAGCCGTAGCGATGGCGGCACCTATGATGCGGATAGCGTGAAA |
| | | | | GGCCGTTTTACCATTAGCCGTGATAACGCGAAAAACACCGTGTATCTGCAGATGAACAGCCTGAA |
| | | | | ACCGGAAGATACCGCGGTGTATTTTTGCGCGGCAGCGAGCGTGAAACTGGTGTATGTGAATCCGA |
| | | | | ACCGTTATAGCTATTGGGGCCAGGGCACCCAGGTGACCGTTAGCTCCGGAGGTGGTGGATCCGAG |
| | | | | GTGCAGCTGGTCGAGTCTGGAGGAGGATTGGTGCAGCCTGGAGGGTCATTGAAACTCTCATGTGC |
| | | | | AGCCTCTGGATTCACCTTCAATAAGTACGCCATGAACTGGGTCCGCCAGGCTCCAGGAAAGGGTT |
| | | | | TGGAATGGGTTGCTCGCATAAGAAGTAAATATAATAATTATGCAACATATTATGCCGATTCAGTG |
| | | | | AAAGACAGGTTCACCATCTCCAGAGATGATTCAAAAAACACTGCCTATCTACAAATGAACAACTT |
| | | | | GAAAACTGAGGACACTGCCGTGTACTACTGTGTGAGACATGGGAACTTCGGTAATAGCTACATAT |
| | | | | CCTACTGGGCTTACTGGGGCCAAGGGACTCTGGTCACCGTCTCCTCAGGTGGTGGTGGTTCTGGC |
| | | | | GGCGGCGGCTCCGGTGGTGGTGGTTCTCAGACTGTTGTGACTCAGGAACCTTCACTCACCGTATC |
| | | | | ACCTGGTGGAACAGTCACACTCACTTGTGGCTCCTCGACTGGGGCTGTTACATCTGGCTACTACC |
| | | | | CAAACTGGGTCCAACAAAAACCAGGTCAGGCACCCCGTGGTCTAATAGGTGGGACTAAGTTCCTC |
| | | | | GCCCCCGGTACTCCTGCCAGATTCTCAGGCTCCCTGCTTGGAGGCAAGGCTGCCCTCACCCTCTC |
| | | | | AGGGGTACAGCCAGAGGATGAGGCAGAATATTACTGTGCTCTATGGTACAGCAACCGCTGGGTGT |
| | | | | TCGGTGGAGGAACCAAACTGACTGTCCTA |
| 384. | EGFR 3D-E8 x | artificial | aa | EVQLLESGGGLVQAGGSLRLSCAASGRTFSTYTMAWFRQAPGKEREFVQGISRSDGGTYDADSVK |
| | F12Q HL | | | GRFTISRDNAKNTVYLQMNSLKPEDTAVYFCAAASVKLVYVNPNRYSYWGQGTQVTVSSGGGGSE |
| | | | | VQLVESGGGLVQPGGSLKLSCAASGFTFNSYAMNWVRQAPGKGLEWVARIRSKYNNYATYYADSV |
| | | | | KGRFTISRDDSKNTAYLQMNNLKTEDTAVYYCVRHGNFGNSYVSWWAYWGQGTLVTVSSGGGGSG |
| | | | | GGGSGGGGSQTVVTQEPSLTVSPGGTVTLTCGSSTGAVTSGNYPNWVQQKPGQAPRGLIGGTKFL |
| | | | | APGTPARFSGSLLGGKAALTLSGVQPEDEAEYYCVLWYSNRWVFGGGTKLTVL |
| 385. | EGFR 3D-E8 x | artificial | nt | GAGGTGCAGCTGCTCGAGAGCGGTGGTGGTCTGGTTCAGGCGGGTGGCAGCCTGCGTCTGAGCTG |
| | F12Q HL | | | TGCGGCGAGCGGCCGTACCTTTAGCACCTATACCATGGCGTGGTTTCGTCAGGCACCGGGCAAAG |
| | | | | AACGTGAATTTGTGCAGGGCATTAGCCGTAGCGATGGCGGCACCTATGATGCGGATAGCGTGAAA |
| | | | | GGCCGTTTTACCATTAGCCGTGATAACGCGAAAAACACCGTGTATCTGCAGATGAACAGCCTGAA |
| | | | | ACCGGAAGATACCGCGGTGTATTTTTGCGCGGCAGCGAGCGTGAAACTGGTGTATGTGAATCCGA |
| | | | | ACCGTTATAGCTATTGGGGCCAGGGCACCCAGGTGACCGTTAGCTCCGGAGGTGGTGGATCCGAG |
| | | | | GTGCAGCTGGTCGAGTCTGGAGGAGGATTGGTGCAGCCTGGAGGGTCATTGAAACTCTCATGTGC |
| | | | | AGCCTCTGGATTCACCTTCAATAGCTACGCCATGAACTGGGTCCGCCAGGCTCCAGGAAAGGGTT |
| | | | | TGGAATGGGTTGCTCGCATAAGAAGTAAATATAATAATTATGCAACATATTATGCCGATTCAGTG |
| | | | | AAAGGCAGGTTCACCATCTCCAGAGATGATTCAAAAAACACTGCCTATCTACAAATGAACAACTT |
| | | | | GAAAACTGAGGACACTGCCGTGTACTACTGTGTGAGACATGGGAACTTCGGTAATAGCTACGTTT |
| | | | | CCTGGTGGGCTTACTGGGGCCAAGGGACTCTGGTCACCGTCTCCTCAGGTGGTGGTGGTTCTGGC |
| | | | | GGCGGCGGCTCCGGTGGTGGTGGTTCTCAGACTGTTGTGACTCAGGAACCTTCACTCACCGTATC |
| | | | | ACCTGGTGGAACAGTCACACTCACTTGTGGCTCCTCGACTGGGGCTGTTACATCTGGCAACTACC |
| | | | | CAAACTGGGTCCAACAAAAACCAGGTCAGGCACCCCGTGGTCTAATAGGTGGGACTAAGTTCCTC |
| | | | | GCCCCCGGTACTCCTGCCAGATTCTCAGGCTCCCTGCTTGGAGGCAAGGCTGCCCTCACCCTCTC |
| | | | | AGGGGTACAGCCAGAGGATGAGGCAGAATATTACTGTGTTCTATGGTACAGCAACCGCTGGGTGT |
| | | | | TCGGTGGAGGAACCAAACTGACTGTCCTA |
| 386. | V EGFR 3D-D12 | artificial | aa | EVQLLESGGGSVQTGGSLRLTCAASGRTSRSYGMGWFRQAPGKEREFVSGISWRGDSTGYADSVK |
| | | | | GRFTISRDNAKNTVDLQMNSLKPEDTAIYYCAAAAGSAWYGTLYEYDYWGQGTQVTVSS |
| 387. | V EGFR 3D-D12 | artificial | aa | SYGMG |
| | CDR1 | | | |
| 388. | V EGFR 3D-D12 | artificial | aa | GISWRGDSTGYADSVKG |
| | CDR2 | | | |
| 389. | V EGFR 3D-D12 | artificial | aa | AAGSAWYGTLYEYDY |
| | CDR3 | | | |
| 390. | V EGFR 3D-D12 | artificial | nt | GAGGTGCAGCTGCTCGAGAGCGGTGGTGGTAGCGTGCAGACCGGCGGTAGCCTGCGTCTGACCTG |
| | | | | TGCGGCGAGCGGTCGTACCAGCCGTAGCTATGGCATGGGCTGGTTTCGTCAGGCACCGGGCAAAG |
| | | | | AACGTGAATTTGTGAGCGGCATTAGCTGGCGTGGCGATAGCACCGGCTATGCGGATAGCGTGAAA |
| | | | | GGCCGTTTTACCATTAGCCGTGATAACGCGAAAAACACCGTGGATCTGCAGATGAACAGCCTGAA |
| | | | | ACCGGAAGATACCGCGATTTATTATTGCGCGGCAGCGGCGGGTAGCGCGTGGTATGGCACCCTGT |
| | | | | ATGAATATGATTATTGGGGCCAGGGCACCCAGGTGACCGTTAGCTCC |
| 391. | V EGFR 3D-D12 | artificial | aa | EVQLLESGGGSVQTGGSLRLTCAASGRTSRSYGMGWFRQAPGKEREFVSGISWRGDSTGYADSVK |
| | x I2C HL | | | GRFTISRDNAKNTVDLQMNSLKPEDTAIYYCAAAAGSAWYGTLYEYDYWGQGTQVTVSSGGGGSE |
| | | | | VQLVESGGGLVQPGGSLKLSCAASGFTFNKYAMNWVRQAPGKGLEWVARIRSKYNNYATYYADSV |
| | | | | KDRFTISRDDSKNTAYLQMNNLKTEDTAVYYCVRHGNFGNSYISYWAYWGQGTLVTVSSGGGGSG |
| | | | | GGGSGGGGSQTVVTQEPSLTVSPGGTVTLTCGSSTGAVTSGNYPNWVQQKPGQAPRGLIGGTKFL |
| | | | | APGTPARFSGSLLGGKAALTLSGVQPEDEAEYYCVLWYSNRWVFGGGTKLTVL |
| 392. | V EGFR 3D-D12 | artificial | nt | GAGGTGCAGCTGCTCGAGAGCGGTGGTGGTAGCGTGCAGACCGGCGGTAGCCTGCGTCTGACCTG |
| | x I2C HL | | | TGCGGCGAGCGGTCGTACCAGCCGTAGCTATGGCATGGGCTGGTTTCGTCAGGCACCGGGCAAAG |
| | | | | AACGTGAATTTGTGAGCGGCATTAGCTGGCGTGGCGATAGCACCGGCTATGCGGATAGCGTGAAA |
| | | | | GGCCGTTTTACCATTAGCCGTGATAACGCGAAAAACACCGTGGATCTGCAGATGAACAGCCTGAA |
| | | | | ACCGGAAGATACCGCGATTTATTATTGCGCGGCAGCGGCGGGTAGCGCGTGGTATGGCACCCTGT |
| | | | | ATGAATATGATTATTGGGGCCAGGGCACCCAGGTGACCGTTAGCTCCGGAGGTGGTGGATCCGAG |
| | | | | GTGCAGCTGGTCGAGTCTGGAGGAGGATTGGTGCAGCCTGGAGGGTCATTGAAACTCTCATGTGC |
| | | | | AGCCTCTGGATTCACCTTCAATAAGTACGCCATGAACTGGGTCCGCCAGGCTCCAGGAAAGGGTT |
| | | | | TGGAATGGGTTGCTCGCATAAGAAGTAAATATAATAATTATGCAACATATTATGCCGATTCAGTG |
| | | | | AAAGACAGGTTCACCATCTCCAGAGATGATTCAAAAAACACTGCCTATCTACAAATGAACAACTT |
| | | | | GAAAACTGAGGACACTGCCGTGTACTACTGTGTGAGACATGGGAACTTCGGTAATAGCTACATAT |
| | | | | CCTACTGGGCTTACTGGGGCCAAGGGACTCTGGTCACCGTCTCCTCAGGTGGTGGTGGTTCTGGC |
| | | | | GGCGGCGGCTCCGGTGGTGGTGGTTCTCAGACTGTTGTGACTCAGGAACCTTCACTCACCGTATC |
| | | | | ACCTGGTGGAACAGTCACACTCACTTGTGGCTCCTCGACTGGGGCTGTTACATCTGGCAACTACC |
| | | | | CAAACTGGGTCCAACAAAAACCAGGTCAGGCACCCCGTGGTCTAATAGGTGGGACTAAGTTCCTC |
| | | | | GCCCCCGGTACTCCTGCCAGATTCTCAGGCTCCCTGCTTGGAGGCAAGGCTGCCCTCACCCTCTC |
| | | | | AGGGGTACAGCCAGAGGATGAGGCAGAATATTACTGTGTTCTATGGTACAGCAACCGCTGGGTGT |
| | | | | TCGGTGGAGGAACCAAACTGACTGTCCTA |
| 393. | V EGFR 3D-D12 | artificial | aa | EVQLLESGGGSVQTGGSLRLTCAASGRTSRSYGMGWFRQAPGKEREFVSGISWRGDSTGYADSVK |
| | x H2C HL | | | GRFTISRDNAKNTVDLQMNSLKPEDTAIYYCAAAAGSAWYGTLYEYDYWGQGTQVTVSSGGGGSE |
| | | | | VQLVESGGGLVQPGGSLKLSCAASGFTFNKYAMNWVRQAPGKGLEWVARIRSKYNNYATYYADSV |
| | | | | KDRFTISRDDSKNTAYLQMNNLKTEDTAVYYCVRHGNFGNSYISYWAYWGQGTLVTVSSGGGGSG |
| | | | | GGGSGGGGSQTVVTQEPSLTVSPGGTVTLTCGSSTGAVTSGYYPNWVQQKPGQAPRGLIGGTKFL |
| | | | | APGTPARFSGSLLGGKAALTLSGVQPEDEAEYYCALWYSNRWVFGGGTKLTVL |
| 394. | V EGFR 3D-D12 | artificial | nt | GAGGTGCAGCTGCTCGAGAGCGGTGGTGGTAGCGTGCAGACCGGCGGTAGCCTGCGTCTGACCTG |
| | x H2C HL | | | TGCGGCGAGCGGTCGTACCAGCCGTAGCTATGGCATGGGCTGGTTTCGTCAGGCACCGGGCAAAG |
| | | | | AACGTGAATTTGTGAGCGGCATTAGCTGGCGTGGCGATAGCACCGGCTATGCGGATAGCGTGAAA |
| | | | | GGCCGTTTTACCATTAGCCGTGATAACGCGAAAAACACCGTGGATCTGCAGATGAACAGCCTGAA |
| | | | | ACCGGAAGATACCGCGATTTATTATTGCGCGGCAGCGGCGGGTAGCGCGTGGTATGGCACCCTGT |
| | | | | ATGAATATGATTATTGGGGCCAGGGCACCCAGGTGACCGTTAGCTCCGGAGGTGGTGGATCCGAG |
| | | | | GTGCAGCTGGTCGAGTCTGGAGGAGGATTGGTGCAGCCTGGAGGGTCATTGAAACTCTCATGTGC |
| | | | | AGCCTCTGGATTCACCTTCAATAAGTACGCCATGAACTGGGTCCGCCAGGCTCCAGGAAAGGGTT |
| | | | | TGGAATGGGTTGCTCGCATAAGAAGTAAATATAATAATTATGCAACATATTATGCCGATTCAGTG |
| | | | | AAAGACAGGTTCACCATCTCCAGAGATGATTCAAAAAACACTGCCTATCTACAAATGAACAACTT |
| | | | | GAAAACTGAGGACACTGCCGTGTACTACTGTGTGAGACATGGGAACTTCGGTAATAGCTACATAT |
| | | | | CCTACTGGGCTTACTGGGGCCAAGGGACTCTGGTCACCGTCTCCTCAGGTGGTGGTGGTTCTGGC |
| | | | | GGCGGCGGCTCCGGTGGTGGTGGTTCTCAGACTGTTGTGACTCAGGAACCTTCACTCACCGTATC |
| | | | | ACCTGGTGGAACAGTCACACTCACTTGTGGCTCCTCGACTGGGGCTGTTACATCTGGCTACTACC |
| | | | | CAAACTGGGTCCAACAAAAACCAGGTCAGGCACCCCGTGGTCTAATAGGTGGGACTAAGTTCCTC |
| | | | | GCCCCCGGTACTCCTGCCAGATTCTCAGGCTCCCTGCTTGGAGGCAAGGCTGCCCTCACCCTCTC |
| | | | | AGGGGTACAGCCAGAGGATGAGGCAGAATATTACTGTGCTCTATGGTACAGCAACCGCTGGGTGT |
| | | | | TCGGTGGAGGAACCAAACTGACTGTCCTA |
| 395. | V EGFR 3D-D12 | artificial | aa | EVQLLESGGGSVQTGGSLRLTCAASGRTSRSYGMGWFRQAPGKEREFVSGISWRGDSTGYADSVK |
| | x F12Q HL | | | GRFTISRDNAKNTVDLQMNSLKPEDTAIYYCAAAAGSAWYGTLYEYDYWGQGTQVTVSSGGGGSE |
| | | | | VQLVESGGGLVQPGGSLKLSCAASGFTFNSYAMNWVRQAPGKGLEWVARIRSKYNNYATYYADSV |
| | | | | KGRFTISRDDSKNTAYLQMNNLKTEDTAVYYCVRHGNFGNSYVSWWAYWGQGTLVTVSSGGGGSG |
| | | | | GGGSGGGGSQTVVTQEPSLTVSPGGTVTLTCGSSTGAVTSGNYPNWVQQKPGQAPRGLIGGTKFL |
| | | | | APGTPARFSGSLLGGKAALTLSGVQPEDEAEYYCVLWYSNRWVFGGGTKLTVL |
| 396. | V EGFR 3D-D12 | artificial | nt | GAGGTGCAGCTGCTCGAGAGCGGTGGTGGTAGCGTGCAGACCGGCGGTAGCCTGCGTCTGACCTG |
| | x F12Q HL | | | TGCGGCGAGCGGTCGTACCAGCCGTAGCTATGGCATGGGCTGGTTTCGTCAGGCACCGGGCAAAG |
| | | | | AACGTGAATTTGTGAGCGGCATTAGCTGGCGTGGCGATAGCACCGGCTATGCGGATAGCGTGAAA |
| | | | | GGCCGTTTTACCATTAGCCGTGATAACGCGAAAAACACCGTGGATCTGCAGATGAACAGCCTGAA |
| | | | | ACCGGAAGATACCGCGATTTATTATTGCGCGGCAGCGGCGGGTAGCGCGTGGTATGGCACCCTGT |
| | | | | ATGAATATGATTATTGGGGCCAGGGCACCCAGGTGACCGTTAGCTCCGGAGGTGGTGGATCCGAG |
| | | | | GTGCAGCTGGTCGAGTCTGGAGGAGGATTGGTGCAGCCTGGAGGGTCATTGAAACTCTCATGTGC |
| | | | | AGCCTCTGGATTCACCTTCAATAGCTACGCCATGAACTGGGTCCGCCAGGCTCCAGGAAAGGGTT |
| | | | | TGGAATGGGTTGCTCGCATAAGAAGTAAATATAATAATTATGCAACATATTATGCCGATTCAGTG |
| | | | | AAAGGCAGGTTCACCATCTCCAGAGATGATTCAAAAAACACTGCCTATCTACAAATGAACAACTT |
| | | | | GAAAACTGAGGACACTGCCGTGTACTACTGTGTGAGACATGGGAACTTCGGTAATAGCTACGTTT |
| | | | | CCTGGTGGGCTTACTGGGGCCAAGGGACTCTGGTCACCGTCTCCTCAGGTGGTGGTGGTTCTGGC |
| | | | | GGCGGCGGCTCCGGTGGTGGTGGTTCTCAGACTGTTGTGACTCAGGAACCTTCACTCACCGTATC |
| | | | | ACCTGGTGGAACAGTCACACTCACTTGTGGCTCCTCGACTGGGGCTGTTACATCTGGCAACTACC |
| | | | | CAAACTGGGTCCAACAAAAACCAGGTCAGGCACCCCGTGGTCTAATAGGTGGGACTAAGTTCCTC |
| | | | | GCCCCCGGTACTCCTGCCAGATTCTCAGGCTCCCTGCTTGGAGGCAAGGCTGCCCTCACCCTCTC |
| | | | | AGGGGTACAGCCAGAGGATGAGGCAGAATATTACTGTGTTCTATGGTACAGCAACCGCTGGGTGT |
| | | | | TCGGTGGAGGAACCAAACTGACTGTCCTA |
| 397. | V CD3 3D-H11 | artificial | aa | EVQLLEEVQLVESGGGLVQPGGSLRLSCAASGFTFDDYGMSWVRQAPGKWLEWVSDISWNGGSTY |
| | | | | YADSVKGRFTISRDNAENTLYLQMNSLKPDDTAVYYCAKMGEGGWGANDYWGQGTQVTVSS |
| 398. | V CD3 3D-H11 | artificial | aa | DYGMS |
| | CDR1 | | | |
| 399. | V CD3 3D-H11 | artificial | aa | DISWNGGSTYYADSVKG |
| | CDR2 | | | |
| 400. | V CD3 3D-H11 | artificial | aa | MGEGGWGANDY |
| | CDR3 | | | |
| 401. | V CD3 3D-H11 | artificial | nt | GAGGTGCAGCTGCTCGAGGAGGTGCAGCTGGTGGAGTCTGGGGGAGGCTTGGTGCAGCCTGGGGG |
| | | | | GTCTCTGAGACTCTCCTGTGCAGCCTCTGGATTCACTTTTGATGATTATGGCATGAGCTGGGTCC |
| | | | | GACAGGCTCCAGGGAAGTGGCTGGAGTGGGTCTCAGATATTAGCTGGAATGGTGGTAGCACATAC |
| | | | | TATGCAGACTCCGTGAAGGGCCGGTTCACCATCTCCAGAGACAACGCCGAGAACACGCTGTATCT |
| | | | | GCAAATGAACAGCCTGAAACCTGACGACACGGCCGTGTATTACTGTGCAAAAATGGGTGAAGGGG |
| | | | | GATGGGGTGCAAATGACTACTGGGGCCAGGGGACCCAGGTCACCGTCTCCTCC |
| 402. | 5′ EGFR AG | artificial | nt | GGTCTAGAGCATGCGACCCTCCGGGACGGCCGGG |
| | XbaI | | | |
| 403. | 3′ EGFR AG | artificial | nt | TTTTAAGTCGACTCATGCTCCAATAAATTCACTGCT |
| | SalI | | | |
| 404. | Forward primer | artificial | nt | CGCTCTGCCCGGCGAGTCGGGC |
| 405. | Reverse primer | artificial | nt | CCGTCTTCCTCCATCTCATAGC |
| 406. | Forward primer | artificial | nt | ACATCCGGAGGTGACAGATCACGGCTCGTGC |
| 407. | Reverse primer | artificial | nt | CAGGATATCCGAACGATGTGGCGCCTTCGC |
| 408. | 5′-VHHa-XhoI | artificial | nt | CTG ACG CTC GAG GAG GTG CAG CTG GTG GAG TCT GG |
| 409. | 5′-VHHb-XhoI | artificial | nt | CTG ACG CTC GAG CAG GTR CAG CTG GTG GAG TCT GG |
| 410. | 5′-VHHc-XhoI | artificial | nt | CTG ACG CTC GAG CAG GTA AAG CTG GAG GAG TCT GG |
| 411. | 5′-VHHd-XhoI | artificial | nt | CTG ACG CTC GAG GAT GTG CAG CTG GTG GAG TCT GG |
| 412. | 5′-VHHe-XhoI | artificial | nt | CTG ACG CTC GAG GCC GTG CAG CTG GTG GAT TCT GG |
| 413. | 5′-VHHf-XhoI | artificial | nt | ACG CTC GAG GCG GTG CAG CTG GTG GAG TCT GG- |
| 414. | 5′-VHH-LP-A- | artificial | nt | CTG ACG CTC GAG GAG GTG CAG CTG CAG GCG TCT G |
| | XhoI | | | |
| 415. | 5′-VHH-LP-B- | artificial | nt | CTG ACG CTC GAG GAT GTS CAG CTG CAG GCG TCT G |
| | XhoI | | | |
| 416. | 5′-VHH-LX-I- | artificial | nt | CTG ACG CTC GAG CAG GTG CAG CTG GTG CAG TCT GG |
| | XhoI | | | |
| 417. | 5′-VHH-LX-II- | artificial | nt | CTG ACG CTC GAG CAG GTC ACC TTG AAG GAG TCT GG |
| | XhoI | | | |
| 418. | 5′-VHH-LX-III- | artificial | nt | CTG ACG CTC GAG CAG GTG CAG CTG CAG GAG TCG GG |
| | XhoI | | | |
| 419. | 5′-VHH-LG-1- | artificial | nt | CTG ACG CTC GAG CTG CAG CAG TCT GGG GGA GG |
| | XhoI | | | |
| 420. | 3′-VHHG2- | artificial | nt | CTG ACG ACT AGT CGT ACG TTG GGG TAT CTT GGG TTC TG |
| | BsiWI-SpeI | | | |
| 421. | 3′-VHHG3- | artificial | nt | CTG ACG ACT AGT CGT ACG TAC TTC ATT CGT TCC TGA VGA G |
| | BsiWI-SpeI | | | |
| 422. | 3′-VHH-LP-G2a- | artificial | nt | CTG ACG ACT AGT CGT ACG TTG TGG TTT TGG TGT CTT GGG TTC |
| | BsiWI-SpeI | | | |
| 423. | 3′-VHH-LP- | artificial | nt | CTG ACG ACT AGT CGT ACG TGA GGA GAC GGT GAC CTG GGT CC |
| | dirA-BsiWI- | | | |
| | SpeI | | | |
| 424. | 3′-VHH-LG- | artificial | nt | CTG ACG ACT AGT CGT ACG GGT GAC CTG GGT CCC CTG GC |
| | dir1-BsiWI- | | | |
| | SpeI | | | |
| 425. | N-termina | artificial | aa | QDGNEEMGGITQTPYKVSISGTTVILTC |
| | 1-27 + | | | |
| | additional C | | | |
| | at position 28 | | | |
| 426. | Flag-tag | artificial | aa | YKDDDDK |
| 427. | Macaca | Macaca | aa | QDGNEEMGSITQTPYQVSISGTTILTC |
| | fascicularis | fascicularis | | |
| | CD3epsilon | | | |
| | 1-27 | | | |
| 428. | Macaca | Macaca | aa | QDGNEEMGSITQTPYQVSISGTTVILT |
| | fascicularis | fascicularis | | |
| | CD3epsilon | | | |
| | 1-27 | | | |
| 429. | Macaca mulatta | Macaca | aa | QDGNEEMGSITQTPYHVSISGTTVILT |
| | CD3epsilon | mulatta | | |
| | 1-27 | | | |

1. A bispecific single chain antibody molecule comprising a first binding domain consisting of one antibody variable domain which is an antigen-interactive site, capable of binding to an epitope of the human and Callithrix jacchus, Sanguinis Oedipus or Saimiri sciureus CD3ε (epsilon) chain, wherein the epitope is part of an amino acid sequence comprised in the group consisting of SEQ ID NOs. 2, 4, 6, or 8, and comprises at least the amino acid sequence Gln-Asp-Gly-Asn-Glu (QDGNE) a second binding domain capable of binding to an epitope of a human and a non-chimpanzee primate tumor target antigen.

2. The bispecific single chain antibody molecule of claim 1, wherein at least one of said first or second binding domain is CDR-grafted, humanized or human.

3. The bispecific single chain antibody molecule of claim 1, wherein at least one of said first or second binding domain is a VHH domain.

4. The bispecific single chain antibody molecule of claim 1, wherein the antibody variable domain of the first binding domain comprises CDR 1 of SEQ ID NO: 398, CDR 2 of SEQ ID NO. 399 and CDR 3 of SEQ ID NO. 400.

5. The bispecific single chain antibody molecule of claim 4, wherein the first binding domain comprises an antibody variable domain as shown in SEQ ID NO. 397 or an amino acid sequence at least 80%, more preferred at least 90% or 95% identical, most preferred at least 96% identical to the amino acid sequence of SEQ ID NO. 397.

6. The bispecific single chain antibody molecule of claim 1 wherein the second binding domain comprises one antibody variable domain or two antibody variable domains.

7. The bispecific single chain antibody molecule of claim 1, wherein the tumor target antigen is EGFR, CD44v6 or CD30.

8. A bispecific single chain antibody molecule comprising a first binding domain capable of binding to an epitope of human and non-chimpanzee primate CD3ε (epsilon) chain, wherein the epitope is part of an amino acid sequence comprised in the group consisting of SEQ ID NOs. 2, 4, 6, and 8, and a second binding domain consisting of one antibody variable domain capable of binding to an epitope of a human and a non-chimpanzee primate tumor target antigen.

9. The bispecific single chain antibody molecule of claim 8, wherein at least one of said first or second binding domain is CDR-grafted, humanized or human.

10. The bispecific single chain antibody molecule of claim, wherein the first binding domain capable of binding to an epitope of human and nonchimpanzee primate CD3ε chain comprises two antibody variable domains.

11. The bispecific single chain antibody molecule according to claim 10, wherein the first binding domain capable of binding to an epitope of human and nonchimpanzee primate CD3ε chain comprises an amino acid sequence selected from the group consisting of SEQ ID NOs: 23, 25, 41, 43, 59, 61, 77, 79, 95, 97, 113, 115, 131, 133, 149, 151, 167, 169, 185 and 187.

12. The bispecific single chain antibody molecule of claim 8, wherein the tumor target antigen is EGFR, CD44v6 or CD30.

13. The bispecific single chain antibody molecule of claim 12, wherein the antibody variable domain of the second binding domain comprises CDR1-3 selected from the group consisting of:
(a) CDR 1 of SEQ ID NO: 376, CDR 2 of SEQ ID NO. 377 and CDR 3 of SEQ ID NO. 378; and
(b) CDR 1 of SEQ ID NO: 387, CDR 2 of SEQ ID NO. 388 and CDR 3 of SEQ ID NO. 389.

14. The bispecific single chain antibody molecule of claim 13, wherein the second binding domain comprises an antibody variable domain as shown in SEQ ID NO. 375 or 386 or an amino acid sequence at least 80%, more preferred at least 90% or 95% identical, most preferred at least 96% identical to the amino acid sequence of SEQ ID NO. 375 or 386.

15. The bispecific single chain antibody molecule according to claim 14, wherein the bispecific single chain antibody molecule comprises a sequence selected from:
(a) an amino acid sequence as depicted in any of SEQ ID NOs. 380, 382, 384, 391, 393 or 395;
(b) an amino acid sequence encoded by a nucleic acid sequence as depicted in any of SEQ ID NOs: 381, 383, 385, 392, 394 or 396; and
(c) an amino acid sequence at least 90% identical, more preferred at least 95% identical, most preferred at least 96% identical to the amino acid sequence of (a) or (b).

16. The polypeptide as defined in claim 1, wherein the epitope is part of an amino acid sequence comprised in the group consisting of SEQ ID NOs:2, 4, 6 and 8 and comprises at least the amino acid sequence Gln-Asp-Gly-Asn-Glu.

The application's sequence listing, which the Patent Office published only in electronic form, follows.

SEQUENCE LISTING (429 sequences)

SEQ ID NO: 1 - protein, 105 aa, Homo sapiens
QDGNEEMGGITQTPYKVSISGTTVILTCPQYPGSEILWQHNDKNIGGDEDDKNIGSDEDHLSLKEFSELEQSGYYVCYPRGSKPEDANFYLYLRARVCENCMEMD

SEQ ID NO: 2 - protein, 27 aa, Homo sapiens
QDGNEEMGGITQTPYKVSISGTTVILT

SEQ ID NO: 3 - protein, 96 aa, Callithrix jacchus
QDGNEEMGDTTQNPYKVSISGTTVTLTCPRYDGHEIKWLVNSQNKEGHEDHLLLEDFSEMEQSGYYACLSKETPAEEASHYLYLKARVCENCVEVD

SEQ ID NO: 4 - protein, 27 aa, Callithrix jacchus
QDGNEEMGDTTQNPYKVSISGTTVTLT

SEQ ID NO: 5 - protein, 96 aa, Saguinus oedipus; identical to SEQ ID NO: 3

SEQ ID NO: 6 - protein, 27 aa, Saguinus oedipus
QDGNEEMGDTTQNPYKVSISGTTVTLT

SEQ ID NO: 7 - protein, 96 aa, Saimiri sciureus
QDGNEEIGDTTQNPYKVSISGTTVTLTCPRYDGQEIKWLVNDQNKEGHEDHLLLEDFSEMEQSGYYACLSKETPTEEASHYLYLKARVCENCVEVD

SEQ ID NO: 8 - protein, 27 aa, Saimiri sciureus
QDGNEEIGDTTQNPYKVSISGTTVTLT

SEQ ID NO: 9 - protein, 14 aa, Artificial Sequence
  CDR-L1 of F6A
GSSTGAVTSGYYPN

SEQ ID NO: 10 - protein, 7 aa, Artificial Sequence
  CDR-L2 of F6A
GTKFLAP

SEQ ID NO: 11 - protein, 9 aa, Artificial Sequence
  CDR-L3 of F6A
ALWYSNRWV

SEQ ID NO: 12 - protein, 5 aa, Artificial Sequence
  CDR-H1 of F6A
IYAMN

SEQ ID NO: 13 - protein, 19 aa, Artificial Sequence
  CDR-H2 of F6A
RIRSKYNNYATYYADSVKS

SEQ ID NO: 14 - protein, 14 aa, Artificial Sequence
  CDR-H3 of F6A
HGNFGNSYVSFFAY

SEQ ID NO: 15 - protein, 125 aa, Artificial Sequence
  VH of F6A
EVQLVESGGGLVQPGGSLKLSCAASGFTFNIYAMNWVRQAPGKGLEWVARIRSKYNNYATYYADSVKSRFTISRDDSKNTAYLQMNNLKTEDTAVYYCVRHGNFGNSYVSFFAYWGQGTLVTVSS

SEQ ID NO: 16 - DNA, 375 bp, Artificial Sequence
  VH of F6A
gaggtgcagctggtcgagtctggaggaggattggtgcagcctggagggtcattgaaactctcatgtgcagcctctggattcaccttcaatatctacgccatgaactgggtccgccaggctccaggaaagggtttggaatgggttgctcgcataagaagtaaatataataattatgcaacatattatgccgattcagtgaaaagcaggttcaccatctccagagatgattcaaaaaacactgcctatctacaaatgaacaacttgaaaactgaggacactgccgtgtactactgtgtgagacatgggaacttcggtaatagctacgtatccttcttcgcttactggggccaagggactctggtcaccgtctcctca

SEQ ID NO: 17 - protein, 109 aa, Artificial Sequence
  VL of F6A
QTVVTQEPSLTVSPGGTVTLTCGSSTGAVTSGYYPNWVQQKPGQAPRGLIGGTKFLAPGTPARFSGSLLGGKAALTLSGVQPEDEAEYYCALWYSNRWVFGGGTKLTVL

SEQ ID NO: 18 - DNA, 327 bp, Artificial Sequence
  VL of F6A
cagactgttgtgactcaggaaccttcactcaccgtatcacctggtggaacagtcacactcacttgtggctcctcgactggggctgttacatctggctactacccaaactgggtccaacaaaaaccaggtcaggcaccccgtggtctaataggtgggactaagttcctcgcccccggtactcctgccagattctcaggctccctgcttggaggcaaggctgccctcaccctctcaggggtacagccagaggatgaggcagaatattactgtgctctatggtacagcaaccgctgggtgttcggtggaggaaccaaactgactgtccta

SEQ ID NO: 19 - protein, 125 aa, Artificial Sequence
  VH-P of F6A
EVQLLESGGGLVQPGGSLKLSCAASGFTFNIYAMNWVRQAPGKGLEWVARIRSKYNNYATYYADSVKSRFTISRDDSKNTAYLQMNNLKTEDTAVYYCVRHGNFGNSYVSFFAYWGQGTLVTVSS

SEQ ID NO: 20 - DNA, 375 bp, Artificial Sequence
  VH-P of F6A
gaggtgcagctgctcgagtctggaggaggattggtgcagcctggagggtcattgaaactctcatgtgcagcctctggattcaccttcaatatctacgccatgaactgggtccgccaggctccaggaaagggtttggaatgggttgctcgcataagaagtaaatataataattatgcaacatattatgccgattcagtgaaaagcaggttcaccatctccagagatgattcaaaaaacactgcctatctacaaatgaacaacttgaaaactgaggacactgccgtgtactactgtgtgagacatgggaacttcggtaatagctacgtatccttcttcgcttactggggccaagggactctggtcaccgtctcctca

SEQ ID NO: 21 - protein, 109 aa, Artificial Sequence
  VL-P of F6A
ELVVTQEPSLTVSPGGTVTLTCGSSTGAVTSGYYPNWVQQKPGQAPRGLIGGTKFLAPGTPARFSGSLLGGKAALTLSGVQPEDEAEYYCALWYSNRWVFGGGTKLTVL

SEQ ID NO: 22 - DNA, 327 bp, Artificial Sequence
  VL-P of F6A
gagctcgttgtgactcaggaaccttcactcaccgtatcacctggtggaacagtcacactcacttgtggctcctcgactggggctgttacatctggctactacccaaactgggtccaacaaaaaccaggtcaggcaccccgtggtctaataggtgggactaagttcctcgcccccggtactcctgccagattctcaggctccctgcttggaggcaaggctgccctcaccctctcaggggtacagccagaggatgaggcagaatattactgtgctctatggtacagcaaccgctgggtgttcggtggaggaaccaaactgactgtccta

SEQ ID NO: 23 - protein, 249 aa, Artificial Sequence
  VH-VL of F6A
EVQLVESGGGLVQPGGSLKLSCAASGFTFNIYAMNWVRQAPGKGLEWVARIRSKYNNYATYYADSVKSRFTISRDDSKNTAYLQMNNLKTEDTAVYYCVRHGNFGNSYVSFFAYWGQGTLVTVSSGGGGSGGGGSGGGGSQTVVTQEPSLTVSPGGTVTLTCGSSTGAVTSGYYPNWVQQKPGQAPRGLIGGTKFLAPGTPARFSGSLLGGKAALTLSGVQPEDEAEYYCALWYSNRWVFGGGTKLTVL

SEQ ID NO: 24 - DNA, 747 bp, Artificial Sequence
  VH-VL of F6A
gaggtgcagctggtcgagtctggaggaggattggtgcagcctggagggtcattgaaactctcatgtgcagcctctggattcaccttcaatatctacgccatgaactgggtccgccaggctccaggaaagggtttggaatgggttgctcgcataagaagtaaatataataattatgcaacatattatgccgattcagtgaaaagcaggttcaccatctccagagatgattcaaaaaacactgcctatctacaaatgaacaacttgaaaactgaggacactgccgtgtactactgtgtgagacatgggaacttcggtaatagctacgtatccttcttcgcttactggggccaagggactctggtcaccgtctcctcaggtggtggtggttctggcggcggcggctccggtggtggtggttctcagactgttgtgactcaggaaccttcactcaccgtatcacctggtggaacagtcacactcacttgtggctcctcgactggggctgttacatctggctactacccaaactgggtccaacaaaaaccaggtcaggcaccccgtggtctaataggtgggactaagttcctcgcccccggtactcctgccagattctcaggctccctgcttggaggcaaggctgccctcaccctctcaggggtacagccagaggatgaggcagaatattactgtgctctatggtacagcaaccgctgggtgttcggtggaggaaccaaactgactgtccta

SEQ ID NO: 25 - protein, 249 aa, Artificial Sequence
  VH-VL-P of F6A
EVQLLESGGGLVQPGGSLKLSCAASGFTFNIYAMNWVRQAPGKGLEWVARIRSKYNNYATYYADSVKSRFTISRDDSKNTAYLQMNNLKTEDTAVYYCVRHGNFGNSYVSFFAYWGQGTLVTVSSGGGGSGGGGSGGGGSELVVTQEPSLTVSPGGTVTLTCGSSTGAVTSGYYPNWVQQKPGQAPRGLIGGTKFLAPGTPARFSGSLLGGKAALTLSGVQPEDEAEYYCALWYSNRWVFGGGTKLTVL

SEQ ID NO: 26 - DNA, 747 bp, Artificial Sequence
  VH-VL-P of F6A
gaggtgcagctgctcgagtctggaggaggattggtgcagcctggagggtcattgaaactctcatgtgcagcctctggattcaccttcaatatctacgccatgaactgggtccgccaggctccaggaaagggtttggaatgggttgctcgcataagaagtaaatataataattatgcaacatattatgccgattcagtgaaaagcaggttcaccatctccagagatgattcaaaaaacactgcctatctacaaatgaacaacttgaaaactgaggacactgccgtgtactactgtgtgagacatgggaacttcggtaatagctacgtatccttcttcgcttactggggccaagggactctggtcaccgtctcctcaggtggtggtggttctggcggcggcggctccggtggtggtggttctgagctcgttgtgactcaggaaccttcactcaccgtatcacctggtggaacagtcacactcacttgtggctcctcgactggggctgttacatctggctactacccaaactgggtccaacaaaaaccaggtcaggcaccccgtggtctaataggtgggactaagttcctcgcccccggtactcctgccagattctcaggctccctgcttggaggcaaggctgccctcaccctctcaggggtacagccagaggatgaggcagaatattactgtgctctatggtacagcaaccgctgggtgttcggtggaggaaccaaactgactgtccta

SEQ ID NO: 27 - protein, 14 aa, Artificial Sequence
  CDR-L1 of H2C
GSSTGAVTSGYYPN

SEQ ID NO: 28 - protein, 7 aa, Artificial Sequence
  CDR-L2 of H2C
GTKFLAP

SEQ ID NO: 29 - protein, 9 aa, Artificial Sequence
  CDR-L3 of H2C
ALWYSNRWV

SEQ ID NO: 30 - protein, 5 aa, Artificial Sequence
  CDR-H1 of H2C
KYAMN

SEQ ID NO: 31 - protein, 19 aa, Artificial Sequence
  CDR-H2 of H2C
RIRSKYNNYATYYADSVKD

SEQ ID NO: 32 - protein, 14 aa, Artificial Sequence
  CDR-H3 of H2C
HGNFGNSYISYWAY

SEQ ID NO: 33 - protein, 125 aa, Artificial Sequence
  VH of H2C
EVQLVESGGGLVQPGGSLKLSCAASGFTFNKYAMNWVRQAPGKGLEWVARIRSKYNNYATYYADSVKDRFTISRDDSKNTAYLQMNNLKTEDTAVYYCVRHGNFGNSYISYWAYWGQGTLVTVSS

SEQ ID NO: 34 - DNA, 375 bp, Artificial Sequence
  VH of H2C
gaggtgcagctggtcgagtctggaggaggattggtgcagcctggagggtcattgaaactctcatgtgcagcctctggattcaccttcaataagtacgccatgaactgggtccgccaggctccaggaaagggtttggaatgggttgctcgcataagaagtaaatataataattatgcaacatattatgccgattcagtgaaagacaggttcaccatctccagagatgattcaaaaaacactgcctatctacaaatgaacaacttgaaaactgaggacactgccgtgtactactgtgtgagacatgggaacttcggtaatagctacatatcctactgggcttactggggccaagggactctggtcaccgtctcctca

SEQ ID NO: 35 - protein, 109 aa, Artificial Sequence; identical to SEQ ID NO: 17
  VL of H2C

SEQ ID NO: 36 - DNA, 327 bp, Artificial Sequence; identical to SEQ ID NO: 18
  VL of H2C

SEQ ID NO: 37 - protein, 125 aa, Artificial Sequence
  VH-P of H2C
EVQLLESGGGLVQPGGSLKLSCAASGFTFNKYAMNWVRQAPGKGLEWVARIRSKYNNYATYYADSVKDRFTISRDDSKNTAYLQMNNLKTEDTAVYYCVRHGNFGNSYISYWAYWGQGTLVTVSS

SEQ ID NO: 38 - DNA, 375 bp, Artificial Sequence
  VH-P of H2C
gaggtgcagctgctcgagtctggaggaggattggtgcagcctggagggtcattgaaactctcatgtgcagcctctggattcaccttcaataagtacgccatgaactgggtccgccaggctccaggaaagggtttggaatgggttgctcgcataagaagtaaatataataattatgcaacatattatgccgattcagtgaaagacaggttcaccatctccagagatgattcaaaaaacactgcctatctacaaatgaacaacttgaaaactgaggacactgccgtgtactactgtgtgagacatgggaacttcggtaatagctacatatcctactgggcttactggggccaagggactctggtcaccgtctcctca

SEQ ID NO: 39 - protein, 109 aa, Artificial Sequence; identical to SEQ ID NO: 21
  VL-P of H2C

SEQ ID NO: 40 - DNA, 327 bp, Artificial Sequence; identical to SEQ ID NO: 22
  VL-P of H2C

SEQ ID NO: 41 - protein, 249 aa, Artificial Sequence
  VH-VL of H2C
EVQLVESGGGLVQPGGSLKLSCAASGFTFNKYAMNWVRQAPGKGLEWVARIRSKYNNYATYYADSVKDRFTISRDDSKNTAYLQMNNLKTEDTAVYYCVRHGNFGNSYISYWAYWGQGTLVTVSSGGGGSGGGGSGGGGSQTVVTQEPSLTVSPGGTVTLTCGSSTGAVTSGYYPNWVQQKPGQAPRGLIGGTKFLAPGTPARFSGSLLGGKAALTLSGVQPEDEAEYYCALWYSNRWVFGGGTKLTVL

SEQ ID NO: 42 - DNA, 747 bp, Artificial Sequence
  VH-VL of H2C
gaggtgcagctggtcgagtctggaggaggattggtgcagcctggagggtcattgaaactctcatgtgcagcctctggattcaccttcaataagtacgccatgaactgggtccgccaggctccaggaaagggtttggaatgggttgctcgcataagaagtaaatataataattatgcaacatattatgccgattcagtgaaagacaggttcaccatctccagagatgattcaaaaaacactgcctatctacaaatgaacaacttgaaaactgaggacactgccgtgtactactgtgtgagacatgggaacttcggtaatagctacatatcctactgggcttactggggccaagggactctggtcaccgtctcctcaggtggtggtggttctggcggcggcggctccggtggtggtggttctcagactgttgtgactcaggaaccttcactcaccgtatcacctggtggaacagtcacactcacttgtggctcctcgactggggctgttacatctggctactacccaaactgggtccaacaaaaaccaggtcaggcaccccgtggtctaataggtgggactaagttcctcgcccccggtactcctgccagattctcaggctccctgcttggaggcaaggctgccctcaccctctcaggggtacagccagaggatgaggcagaatattactgtgctctatggtacagcaaccgctgggtgttcggtggaggaaccaaactgactgtccta

SEQ ID NO: 43 - protein, 249 aa, Artificial Sequence
  VH-VL-P of H2C
EVQLLESGGGLVQPGGSLKLSCAASGFTFNKYAMNWVRQAPGKGLEWVARIRSKYNNYATYYADSVKDRFTISRDDSKNTAYLQMNNLKTEDTAVYYCVRHGNFGNSYISYWAYWGQGTLVTVSSGGGGSGGGGSGGGGSELVVTQEPSLTVSPGGTVTLTCGSSTGAVTSGYYPNWVQQKPGQAPRGLIGGTKFLAPGTPARFSGSLLGGKAALTLSGVQPEDEAEYYCALWYSNRWVFGGGTKLTVL

SEQ ID NO: 44 - DNA, 747 bp, Artificial Sequence
  VH-VL-P of H2C
gaggtgcagctgctcgagtctggaggaggattggtgcagcctggagggtcattgaaactctcatgtgcagcctctggattcaccttcaataagtacgccatgaactgggtccgccaggctccaggaaagggtttggaatgggttgctcgcataagaagtaaatataataattatgcaacatattatgccgattcagtgaaagacaggttcaccatctccagagatgattcaaaaaacactgcctatctacaaatgaacaacttgaaaactgaggacactgccgtgtactactgtgtgagacatgggaacttcggtaatagctacatatcctactgggcttactggggccaagggactctggtcaccgtctcctcaggtggtggtggttctggcggcggcggctccggtggtggtggttctgagctcgttgtgactcaggaaccttcactcaccgtatcacctggtggaacagtcacactcacttgtggctcctcgactggggctgttacatctggctactacccaaactgggtccaacaaaaaccaggtcaggcaccccgtggtctaataggtgggactaagttcctcgcccccggtactcctgccagattctcaggctccctgcttggaggcaaggctgccctcaccctctcaggggtacagccagaggatgaggcagaatattactgtgctctatggtacagcaaccgctgggtgttcggtggaggaaccaaactgactgtccta

SEQ ID NO: 45 - protein, 14 aa, Artificial Sequence
  CDR-L1 of H1E
GSSTGAVTSGYYPN

SEQ ID NO: 46 - protein, 7 aa, Artificial Sequence
  CDR-L2 of H1E
GTKFLAP

SEQ ID NO: 47 - protein, 9 aa, Artificial Sequence
  CDR-L3 of H1E
ALWYSNRWV

SEQ ID NO: 48 - protein, 5 aa, Artificial Sequence
  CDR-H1 of H1E
SYAMN

SEQ ID NO: 49 - protein, 19 aa, Artificial Sequence
  CDR-H2 of H1E
RIRSKYNNYATYYADSVKG

SEQ ID NO: 50 - protein, 14 aa, Artificial Sequence
  CDR-H3 of H1E
HGNFGNSYLSFWAY

SEQ ID NO: 51 - protein, 125 aa, Artificial Sequence
  VH of H1E
EVQLVESGGGLEQPGGSLKLSCAASGFTFNSYAMNWVRQAPGKGLEWVARIRSKYNNYATYYADSVKGRFTISRDDSKNTAYLQMNNLKTEDTAVYYCVRHGNFGNSYLSFWAYWGQGTLVTVSS

SEQ ID NO: 52 - DNA, 374 bp, Artificial Sequence
  VH of H1E
gaggtgcagctggtcgagtctggaggaggattggagcagcctggagggtcattgaaactctcatgtgcagcctctggattcaccttcaattcgtacgccatgaactgggtccgccaggctccaggaaagggtttggaatgggttgctcgcataagaagtaaatataataattatgcaacatattatgccgattcagtgaaagggaggttcaccatctccagagatgattcaaaaaacactgcctatctacaaatgaacaacttgaaaactgaggacactgccgtgtactactgtgtgagacatgggaacttcggtaatagctacctatccttctgggcttactggggccaagggactctggtcaccgtctcctc

SEQ ID NO: 53 - protein, 109 aa, Artificial Sequence; identical to SEQ ID NO: 17
  VL of H1E

SEQ ID NO: 54 - DNA, 327 bp, Artificial Sequence; identical to SEQ ID NO: 18
  VL of H1E

SEQ ID NO: 55 - protein, 125 aa, Artificial Sequence
  VH-P of H1E
EVQLLESGGGLEQPGGSLKLSCAASGFTFNSYAMNWVRQAPGKGLEWVARIRSKYNNYATYYADSVKGRFTISRDDSKNTAYLQMNNLKTEDTAVYYCVRHGNFGNSYLSFWAYWGQGTLVTVSS

SEQ ID NO: 56 - DNA, 375 bp, Artificial Sequence
  VH-P of H1E
gaggtgcagctgctcgagtctggaggaggattggagcagcctggagggtcattgaaactctcatgtgcagcctctggattcaccttcaattcgtacgccatgaactgggtccgccaggctccaggaaagggtttggaatgggttgctcgcataagaagtaaatataataattatgcaacatattatgccgattcagtgaaagggaggttcaccatctccagagatgattcaaaaaacactgcctatctacaaatgaacaacttgaaaactgaggacactgccgtgtactactgtgtgagacatgggaacttcggtaatagctacctatccttctgggcttactggggccaagggactctggtcaccgtctcctca

SEQ ID NO: 57 - protein, 109 aa, Artificial Sequence; identical to SEQ ID NO: 21
  VL-P of H1E

SEQ ID NO: 58 - DNA, 327 bp, Artificial Sequence; identical to SEQ ID NO: 22
  VL-P of H1E

SEQ ID NO: 59 - protein, 249 aa, Artificial Sequence
  VH-VL of H1E
EVQLVESGGGLEQPGGSLKLSCAASGFTFNSYAMNWVRQAPGKGLEWVARIRSKYNNYATYYADSVKGRFTISRDDSKNTAYLQMNNLKTEDTAVYYCVRHGNFGNSYLSFWAYWGQGTLVTVSSGGGGSGGGGSGGGGSQTVVTQEPSLTVSPGGTVTLTCGSSTGAVTSGYYPNWVQQKPGQAPRGLIGGTKFLAPGTPARFSGSLLGGKAALTLSGVQPEDEAEYYCALWYSNRWVFGGGTKLTVL

SEQ ID NO: 60 - DNA, 747 bp, Artificial Sequence
  VH-VL of H1E
gaggtgcagctggtcgagtctggaggaggattggagcagcctggagggtcattgaaactctcatgtgcagcctctggattcaccttcaattcgtacgccatgaactgggtccgccaggctccaggaaagggtttggaatgggttgctcgcataagaagtaaatataataattatgcaacatattatgccgattcagtgaaagggaggttcaccatctccagagatgattcaaaaaacactgcctatctacaaatgaacaacttgaaaactgaggacactgccgtgtactactgtgtgagacatgggaacttcggtaatagctacctatccttctgggcttactggggccaagggactctggtcaccgtctcctcaggtggtggtggttctggcggcggcggctccggtggtggtggttctcagactgttgtgactcaggaaccttcactcaccgtatcacctggtggaacagtcacactcacttgtggctcctcgactggggctgttacatctggctactacccaaactgggtccaacaaaaaccaggtcaggcaccccgtggtctaataggtgggactaagttcctcgcccccggtactcctgccagattctcaggctccctgcttggaggcaaggctgccctcaccctctcaggggtacagccagaggatgaggcagaatattactgtgctctatggtacagcaaccgctgggtgttcggtggaggaaccaaactgactgtccta

SEQ ID NO: 61 - protein, 249 aa, Artificial Sequence
  VH-VL-P of H1E
EVQLLESGGGLEQPGGSLKLSCAASGFTFNSYAMNWVRQAPGKGLEWVARIRSKYNNYATYYADSVKGRFTISRDDSKNTAYLQMNNLKTEDTAVYYCVRHGNFGNSYLSFWAYWGQGTLVTVSSGGGGSGGGGSGGGGSELVVTQEPSLTVSPGGTVTLTCGSSTGAVTSGYYPNWVQQKPGQAPRGLIGGTKFLAPGTPARFSGSLLGGKAALTLSGVQPEDEAEYYCALWYSNRWVFGGGTKLTVL

SEQ ID NO: 62 - DNA, 747 bp, Artificial Sequence
  VH-VL-P of H1E
gaggtgcagctgctcgagtctggaggaggattggagcagcctggagggtcattgaaactctcatgtgcagcctctggattcaccttcaattcgtacgccatgaactgggtccgccaggctccaggaaagggtttggaatgggttgctcgcataagaagtaaatataataattatgcaacatattatgccgattcagtgaaagggaggttcaccatctccagagatgattcaaaaaacactgcctatctacaaatgaacaacttgaaaactgaggacactgccgtgtactactgtgtgagacatgggaacttcggtaatagctacctatccttctgggcttactggggccaagggactctggtcaccgtctcctcaggtggtggtggttctggcggcggcggctccggtggtggtggttctgagctcgttgtgactcaggaaccttcactcaccgtatcacctggtggaacagtcacactcacttgtggctcctcgactggggctgttacatctggctactacccaaactgggtccaacaaaaaccaggtcaggcaccccgtggtctaataggtgggactaagttcctcgcccccggtactcctgccagattctcaggctccctgcttggaggcaaggctgccctcaccctctcaggggtacagccagaggatgaggcagaatattactgtgctctatggtacagcaaccgctgggtgttcggtggaggaaccaaactgactgtccta

SEQ ID NO: 63 - protein, 14 aa, Artificial Sequence
  CDR-L1 of G4H
GSSTGAVTSGYYPN

SEQ ID NO: 64 - protein, 7 aa, Artificial Sequence
  CDR-L2 of G4H
GTKFLAP

SEQ ID NO: 65 - protein, 9 aa, Artificial Sequence
  CDR-L3 of G4H
ALWYSNRWV

SEQ ID NO: 66 - protein, 5 aa, Artificial Sequence
  CDR-H1 of G4H
RYAMN

SEQ ID NO: 67 - protein, 19 aa, Artificial Sequence
  CDR-H2 of G4H
RIRSKYNNYATYYADSVKG

SEQ ID NO: 68 - protein, 14 aa, Artificial Sequence
  CDR-H3 of G4H
HGNFGNSYLSYFAY

SEQ ID NO: 69 - protein, 125 aa, Artificial Sequence
  VH of G4H
EVQLVESGGGLVQPGGSLKLSCAASGFTFNRYAMNWVRQAPGKGLEWVARIRSKYNNYATYYADSVKGRFTISRDDSKNTAYLQMNNLKTEDTAVYYCVRHGNFGNSYLSYFAYWGQGTLVTVSS

SEQ ID NO: 70 - DNA, 375 bp, Artificial Sequence
  VH of G4H
gaggtgcagctggtcgagtctggaggaggattggtgcagcctggagggtcattgaaactctcatgtgcagcctctggattcaccttcaatcgctacgccatgaactgggtccgccaggctccaggaaagggtttggaatgggttgctcgcataagaagtaaatataataattatgcaacatattatgccgattcagtgaaagggaggttcaccatctccagagatgattcaaaaaacactgcctatctacaaatgaacaacttgaaaactgaggacactgccgtgtactactgtgtgagacatgggaacttcggtaatagctacttatcctacttcgcttactggggccaagggactctggtcaccgtctcctca

SEQ ID NO: 71 - protein, 109 aa, Artificial Sequence; identical to SEQ ID NO: 17
  VL of G4H

SEQ ID NO: 72 - DNA, 327 bp, Artificial Sequence; identical to SEQ ID NO: 18
  VL of G4H

SEQ ID NO: 73 - protein, 125 aa, Artificial Sequence
  VH-P of G4H
EVQLLESGGGLVQPGGSLKLSCAASGFTFNRYAMNWVRQAPGKGLEWVARIRSKYNNYATYYADSVKGRFTISRDDSKNTAYLQMNNLKTEDTAVYYCVRHGNFGNSYLSYFAYWGQGTLVTVSS

SEQ ID NO: 74 - DNA, 375 bp, Artificial Sequence
  VH-P of G4H
gaggtgcagctgctcgagtctggaggaggattggtgcagcctggagggtcattgaaactctcatgtgcagcctctggattcaccttcaatcgctacgccatgaactgggtccgccaggctccaggaaagggtttggaatgggttgctcgcataagaagtaaatataataattatgcaacatattatgccgattcagtgaaagggaggttcaccatctccagagatgattcaaaaaacactgcctatctacaaatgaacaacttgaaaactgaggacactgccgtgtactactgtgtgagacatgggaacttcggtaatagctacttatcctacttcgcttactggggccaagggactctggtcaccgtctcctca

SEQ ID NO: 75 - protein, 109 aa, Artificial Sequence; identical to SEQ ID NO: 21
  VL-P of G4H

SEQ ID NO: 76 - DNA, 327 bp, Artificial Sequence; identical to SEQ ID NO: 22
  VL-P of G4H

SEQ ID NO: 77 - protein, 249 aa, Artificial Sequence
  VH-VL of G4H
EVQLVESGGGLVQPGGSLKLSCAASGFTFNRYAMNWVRQAPGKGLEWVARIRSKYNNYATYYADSVKGRFTISRDDSKNTAYLQMNNLKTEDTAVYYCVRHGNFGNSYLSYFAYWGQGTLVTVSSGGGGSGGGGSGGGGSQTVVTQEPSLTVSPGGTVTLTCGSSTGAVTSGYYPNWVQQKPGQAPRGLIGGTKFLAPGTPARFSGSLLGGKAALTLSGVQPEDEAEYYCALWYSNRWVFGGGTKLTVL

SEQ ID NO: 78 - DNA, 747 bp, Artificial Sequence
  VH-VL of G4H
gaggtgcagctggtcgagtctggaggaggattggtgcagcctggagggtcattgaaactctcatgtgcagcctctggattcaccttcaatcgctacgccatgaactgggtccgccaggctccaggaaagggtttggaatgggttgctcgcataagaagtaaatataataattatgcaacatattatgccgattcagtgaaagggaggttcaccatctccagagatgattcaaaaaacactgcctatctacaaatgaacaacttgaaaactgaggacactgccgtgtactactgtgtgagacatgggaacttcggtaatagctacttatcctacttcgcttactggggccaagggactctggtcaccgtctcctcaggtggtggtggttctggcggcggcggctccggtggtggtggttctcagactgttgtgactcaggaaccttcactcaccgtatcacctggtggaacagtcacactcacttgtggctcctcgactggggctgttacatctggctactacccaaactgggtccaacaaaaaccaggtcaggcaccccgtggtctaataggtgggactaagttcctcgcccccggtactcctgccagattctcaggctccctgcttggaggcaaggctgccctcaccctctcaggggtacagccagaggatgaggcagaatattactgtgctctatggtacagcaaccgctgggtgttcggtggaggaaccaaactgactgtccta

SEQ ID NO: 79 - protein, 249 aa, Artificial Sequence
  VH-VL-P of G4H
EVQLLESGGGLVQPGGSLKLSCAASGFTFNRYAMNWVRQAPGKGLEWVARIRSKYNNYATYYADSVKGRFTISRDDSKNTAYLQMNNLKTEDTAVYYCVRHGNFGNSYLSYFAYWGQGTLVTVSSGGGGSGGGGSGGGGSELVVTQEPSLTVSPGGTVTLTCGSSTGAVTSGYYPNWVQQKPGQAPRGLIGGTKFLAPGTPARFSGSLLGGKAALTLSGVQPEDEAEYYCALWYSNRWVFGGGTKLTVL

SEQ ID NO: 80 - DNA, 747 bp, Artificial Sequence
  VH-VL-P of G4H
gaggtgcagctgctcgagtctggaggaggattggtgcagcctggagggtcattgaaactctcatgtgcagcctctggattcaccttcaatcgctacgccatgaactgggtccgccaggctccaggaaagggtttggaatgggttgctcgcataagaagtaaatataataattatgcaacatattatgccgattcagtgaaagggaggttcaccatctccagagatgattcaaaaaacactgcctatctacaaatgaacaacttgaaaactgaggacactgccgtgtactactgtgtgagacatgggaacttcggtaatagctacttatcctacttcgcttactggggccaagggactctggtcaccgtctcctcaggtggtggtggttctggcggcggcggctccggtggtggtggttctgagctcgttgtgactcaggaaccttcactcaccgtatcacctggtggaacagtcacactcacttgtggctcctcgactggggctgttacatctggctactacccaaactgggtccaacaaaaaccaggtcaggcaccccgtggtctaataggtgggactaagttcctcgcccccggtactcctgccagattctcaggctccctgcttggaggcaaggctgccctcaccctctcaggggtacagccagaggatgaggcagaatattactgtgctctatggtacagcaaccgctgggtgttcggtggaggaaccaaactgactgtccta

SEQ ID NO: 81 - protein, 14 aa, Artificial Sequence
  CDR-L1 of A2J
RSSTGAVTSGYYPN

SEQ ID NO: 82 - protein, 7 aa, Artificial Sequence
  CDR-L2 of A2J
ATDMRPS

SEQ ID NO: 83 - protein, 9 aa, Artificial Sequence
  CDR-L3 of A2J
ALWYSNRWV

SEQ ID NO: 84 - protein, 5 aa, Artificial Sequence
  CDR-H1 of A2J
VYAMN

SEQ ID NO: 85 - protein, 19 aa, Artificial Sequence
  CDR-H2 of A2J
RIRSKYNNYATYYADSVKK

SEQ ID NO: 86 - protein, 14 aa, Artificial Sequence
  CDR-H3 of A2J
HGNFGNSYLSWWAY

SEQ ID NO: 87 - protein, 125 aa, Artificial Sequence
  VH of A2J
EVQLVESGGGLVQPGGSLKLSCAASGFTFNVYAMNWVRQAPGKGLEWVARIRSKYNNYATYYADSVKKRFTISRDDSKNTAYLQMNNLKTEDTAVYYCVRHGNFGNSYLSWWAYWGQGTLVTVSS

SEQ ID NO: 88 - DNA, 375 bp, Artificial Sequence
  VH of A2J
gaggtgcagctggtcgagtctggaggaggattggtgcagcctggagggtcattgaaactctcatgtgcagcctctggattcaccttcaatgtctacgccatgaactgggtccgccaggctccaggaaagggtttggaatgggttgctcgcataagaagtaaatataataattatgcaacatattatgccgattcagtgaaaaagaggttcaccatctccagagatgattcaaaaaacactgcctatctacaaatgaacaacttgaaaactgaggacactgccgtgtactactgtgtgagacatgggaacttcggtaatagctacttatcctggtgggcttactggggccaagggactctggtcaccgtctcctca

SEQ ID NO: 89 - protein, 109 aa, Artificial Sequence
  VL of A2J
QTVVTQEPSLTVSPGGTVTLTCRSSTGAVTSGYYPNWVQQKPGQAPRGLIGATDMRPSGTPARFSGSLLGGKAALTLSGVQPEDEAEYYCALWYSNRWVFGGGTKLTVL

SEQ ID NO: 90 - DNA, 327 bp, Artificial Sequence
  VL of A2J
cagactgttgtgactcaggaaccttcactcaccgtatcacctggtggaacagtcacactcacttgtcgctcctcgactggggctgttacatctggctactacccaaactgggtccaacaaaaaccaggtcaggcaccccgtggtctaataggtgccactgacatgaggccctctggtactcctgccagattctcaggctccctgcttggaggcaaggctgccctcaccctctcaggggtacagccagaggatgaggcagaatattactgtgctctatggtacagcaaccgctgggtgttcggtggaggaaccaaactgactgtccta

SEQ ID NO: 91 - protein, 125 aa, Artificial Sequence
  VH-P of A2J
EVQLLESGGGLVQPGGSLKLSCAASGFTFNVYAMNWVRQAPGKGLEWVARIRSKYNNYATYYADSVKKRFTISRDDSKNTAYLQMNNLKTEDTAVYYCVRHGNFGNSYLSWWAYWGQGTLVTVSS

SEQ ID NO: 92 - DNA, 375 bp, Artificial Sequence
  VH-P of A2J
gaggtgcagctgctcgagtctggaggaggattggtgcagcctggagggtcattgaaactctcatgtgcagcctctggattcaccttcaatgtctacgccatgaactgggtccgccaggctccaggaaagggtttggaatgggttgctcgcataagaagtaaatataataattatgcaacatattatgccgattcagtgaaaaagaggttcaccatctccagagatgattcaaaaaacactgcctatctacaaatgaacaacttgaaaactgaggacactgccgtgtactactgtgtgagacatgggaacttcggtaatagctacttatcctggtgggcttactggggccaagggactctggtcaccgtctcctca

SEQ ID NO: 93 - protein, 109 aa, Artificial Sequence
  Artificial Sequence
ELVVTQEPSLTVSPGGTVTLTCRSSTGAVTSGYYPNWVQQKPGQAPRGLIGATDMRPSGTPARFSGSLLGGKAALTLSGVQPEDEAEYYCALWYSNRWVFGGGTKLTVL

SEQ ID NO: 94 - DNA, 327 bp, Artificial Sequence
  VL-P of A2J
gagctcgttgtgactcaggaaccttcactcaccgtatcacctggtggaacagtcacactcacttgtcgctcctcgactggggctgttacatctggctactacccaaactgggtccaacaaaaaccaggtcaggcaccccgtggtctaataggtgccactgacatgaggccctctggtactcctgccagattctcaggctccctgcttggaggcaaggctgccctcaccctctcaggggtacagccagaggatgaggcagaatattactgtgctctatggtacagcaaccgctgggtgttcggtggaggaaccaaactgactgtccta

SEQ ID NO: 95 - protein, 249 aa, Artificial Sequence
  VH-VL of A2J
EVQLVESGGGLVQPGGSLKLSCAASGFTFNVYAMNWVRQAPGKGLEWVARIRSKYNNYATYYADSVKKRFTISRDDSKNTAYLQMNNLKTEDTAVYYCVRHGNFGNSYLSWWAYWGQGTLVTVSSGGGGSGGGGSGGGGSQTVVTQEPSLTVSPGGTVTLTCRSSTGAVTSGYYPNWVQQKPGQAPRGLIGATDMRPSGTPARFSGSLLGGKAALTLSGVQPEDEAEYYCALWYSNRWVFGGGTKLTVL

SEQ ID NO: 96 - DNA, 747 bp, Artificial Sequence
  VH-VL of A2J
gaggtgcagctggtcgagtctggaggaggattggtgcagcctggagggtcattgaaactctcatgtgcagcctctggattcaccttcaatgtctacgccatgaactgggtccgccaggctccaggaaagggtttggaatgggttgctcgcataagaagtaaatataataattatgcaacatattatgccgattcagtgaaaaagaggttcaccatctccagagatgattcaaaaaacactgcctatctacaaatgaacaacttgaaaactgaggacactgccgtgtactactgtgtgagacatgggaacttcggtaatagctacttatcctggtgggcttactggggccaagggactctggtcaccgtctcctcaggtggtggtggttctggcggcggcggctccggtggtggtggttctcagactgttgtgactcaggaaccttcactcaccgtatcacctggtggaacagtcacactcacttgtcgctcctcgactggggctgttacatctggctactacccaaactgggtccaacaaaaaccaggtcaggcaccccgtggtctaataggtgccactgacatgaggccctctggtactcctgccagattctcaggctccctgcttggaggcaaggctgccctcaccctctcaggggtacagccagaggatgaggcagaatattactgtgctctatggtacagcaaccgctgggtgttcggtggaggaaccaaactgactgtccta

SEQ ID NO: 97 - protein, 249 aa, Artificial Sequence
  VH-VL-P of A2J
EVQLLESGGGLVQPGGSLKLSCAASGFTFNVYAMNWVRQAPGKGLEWVARIRSKYNNYATYYADSVKKRFTISRDDSKNTAYLQMNNLKTEDTAVYYCVRHGNFGNSYLSWWAYWGQGTLVTVSSGGGGSGGGGSGGGGSELVVTQEPSLTVSPGGTVTLTCRSSTGAVTSGYYPNWVQQKPGQAPRGLIGATDMRPSGTPARFSGSLLGGKAALTLSGVQPEDEAEYYCALWYSNRWVFGGGTKLTVL

SEQ ID NO: 98 - DNA, 747 bp, Artificial Sequence
  VH-VL-P of A2J
gaggtgcagctgctcgagtctggaggaggattggtgcagcctggagggtcattgaaactctcatgtgcagcctctggattcaccttcaatgtctacgccatgaactgggtccgccaggctccaggaaagggtttggaatgggttgctcgcataagaagtaaatataataattatgcaacatattatgccgattcagtgaaaaagaggttcaccatctccagagatgattcaaaaaacactgcctatctacaaatgaacaacttgaaaactgaggacactgccgtgtactactgtgtgagacatgggaacttcggtaatagctacttatcctggtgggcttactggggccaagggactctggtcaccgtctcctcaggtggtggtggttctggcggcggcggctccggtggtggtggttctgagctcgttgtgactcaggaaccttcactcaccgtatcacctggtggaacagtcacactcacttgtcgctcctcgactggggctgttacatctggctactacccaaactgggtccaacaaaaaccaggtcaggcaccccgtggtctaataggtgccactgacatgaggccctctggtactcctgccagattctcaggctccctgcttggaggcaaggctgccctcaccctctcaggggtacagccagaggatgaggcagaatattactgtgctctatggtacagcaaccgctgggtgttcggtggaggaaccaaactgactgtccta

SEQ ID NO: 99 - protein, 14 aa, Artificial Sequence
  CDR-L1 of E1L
GSSTGAVTSGYYPN

SEQ ID NO: 100 - protein, 7 aa, Artificial Sequence
  CDR-L2 of E1L
GTKFLAP

SEQ ID NO: 101 - protein, 9 aa, Artificial Sequence
  CDR-L3 of E1L
ALWYSNRWV

SEQ ID NO: 102 - protein, 5 aa, Artificial Sequence
  CDR-H1 of E1L
KYAMN

SEQ ID NO: 103 - protein, 19 aa, Artificial Sequence
  CDR-H2 of E1L
RIRSKYNNYATYYADSVKS

SEQ ID NO: 104 - protein, 14 aa, Artificial Sequence
  CDR-H3 of E1L
HGNFGNSYTSYYAY

SEQ ID NO: 105 - protein, 125 aa, Artificial Sequence
  VH of E1L
EVQLVESGGGLVQPGGSLKLSCAASGFTFNKYAMNWVRQAPGKGLEWVARIRSKYNNYATYYADSVKSRFTISRDDSKNTAYLQMNNLKTEDTAVYYCVRHGNFGNSYTSYYAYWGQGTLVTVSS

SEQ ID NO: 106 - DNA, 375 bp, Artificial Sequence
  VH of E1L
gaggtgcagctggtcgagtctggaggaggattggtgcagcctggagggtcattgaaactctcatgtgcagcctctggattcaccttcaataagtacgccatgaactgggtccgccaggctccaggaaagggtttggaatgggttgctcgcataagaagtaaatataataattatgcaacatattatgccgattcagtgaaatcgaggttcaccatctccagagatgattcaaaaaacactgcctatctacaaatgaacaacttgaaaactgaggacactgccgtgtactactgtgtgagacatgggaacttcggtaatagctacacatcctactacgcttactggggccaagggactctggtcaccgtctcctca

SEQ ID NO: 107 - protein, 109 aa, Artificial Sequence; identical to SEQ ID NO: 17
  VL of E1L

SEQ ID NO: 108 - DNA, 327 bp, Artificial Sequence; identical to SEQ ID NO: 18
  VL of E1L

SEQ ID NO: 109 - protein, 125 aa, Artificial Sequence
  VH-P of E1L
EVQLLESGGGLVQPGGSLKLSCAASGFTFNKYAMNWVRQAPGKGLEWVARIRSKYNNYATYYADSVKSRFTISRDDSKNTAYLQMNNLKTEDTAVYYCVRHGNFGNSYTSYYAYWGQGTLVTVSS

SEQ ID NO: 110 - DNA, 375 bp, Artificial Sequence
  VH-P of E1L
gaggtgcagctgctcgagtctggaggaggattggtgcagcctggagggtcattgaaactctcatgtgcagcctctggattcaccttcaataagtacgccatgaactgggtccgccaggctccaggaaagggtttggaatgggttgctcgcataagaagtaaatataataattatgcaacatattatgccgattcagtgaaatcgaggttcaccatctccagagatgattcaaaaaacactgcctatctacaaatgaacaacttgaaaactgaggacactgccgtgtactactgtgtgagacatgggaacttcggtaatagctacacatcctactacgcttactggggccaagggactctggtcaccgtctcctca

SEQ ID NO: 111 - protein, 109 aa, Artificial Sequence; identical to SEQ ID NO: 21
  VL-P of E1L

SEQ ID NO: 112 - DNA, 327 bp, Artificial Sequence; identical to SEQ ID NO: 22
  VL-P of E1L

SEQ ID NO: 113 - protein, 249 aa, Artificial Sequence
  VH-VL of E1L
EVQLVESGGGLVQPGGSLKLSCAASGFTFNKYAMNWVRQAPGKGLEWVARIRSKYNNYATYYADSVKSRFTISRDDSKNTAYLQMNNLKTEDTAVYYCVRHGNFGNSYTSYYAYWGQGTLVTVSSGGGGSGGGGSGGGGSQTVVTQEPSLTVSPGGTVTLTCGSSTGAVTSGYYPNWVQQKPGQAPRGLIGGTKFLAPGTPARFSGSLLGGKAALTLSGVQPEDEAEYYCALWYSNRWVFGGGTKLTVL

SEQ ID NO: 114 - DNA, 747 bp, Artificial Sequence
  VH-VL of E1L
gaggtgcagctggtcgagtctggaggaggattggtgcagcctggagggtcattgaaactctcatgtgcagcctctggattcaccttcaataagtacgccatgaactgggtccgccaggctccaggaaagggtttggaatgggttgctcgcataagaagtaaatataataattatgcaacatattatgccgattcagtgaaatcgaggttcaccatctccagagatgattcaaaaaacactgcctatctacaaatgaacaacttgaaaactgaggacactgccgtgtactactgtgtgagacatgggaacttcggtaatagctacacatcctactacgcttactggggccaagggactctggtcaccgtctcctcaggtggtggtggttctggcggcggcggctccggtggtggtggttctcagactgttgtgactcaggaaccttcactcaccgtatcacctggtggaacagtcacactcacttgtggctcctcgactggggctgttacatctggctactacccaaactgggtccaacaaaaaccaggtcaggcaccccgtggtctaataggtgggactaagttcctcgcccccggtactcctgccagattctcaggctccctgcttggaggcaaggctgccctcaccctctcaggggtacagccagaggatgaggcagaatattactgtgctctatggtacagcaaccgctgggtgttcggtggaggaaccaaactgactgtccta

SEQ ID NO: 115 - protein, 249 aa, Artificial Sequence
  VH-VL-P of E1L
EVQLLESGGGLVQPGGSLKLSCAASGFTFNKYAMNWVRQAPGKGLEWVARIRSKYNNYATYYADSVKSRFTISRDDSKNTAYLQMNNLKTEDTAVYYCVRHGNFGNSYTSYYAYWGQGTLVTVSSGGGGSGGGGSGGGGSELVVTQEPSLTVSPGGTVTLTCGSSTGAVTSGYYPNWVQQKPGQAPRGLIGGTKFLAPGTPARFSGSLLGGKAALTLSGVQPEDEAEYYCALWYSNRWVFGGGTKLTVL

SEQ ID NO: 116 - DNA, 747 bp, Artificial Sequence
  VH-VL-P of E1L
gaggtgcagctgctcgagtctggaggaggattggtgcagcctggagggtcattgaaactctcatgtgcagcctctggattcaccttcaataagtacgccatgaactgggtccgccaggctccaggaaagggtttggaatgggttgctcgcataagaagtaaatataataattatgcaacatattatgccgattcagtgaaatcgaggttcaccatctccagagatgattcaaaaaacactgcctatctacaaatgaacaacttgaaaactgaggacactgccgtgtactactgtgtgagacatgggaacttcggtaatagctacacatcctactacgcttactggggccaagggactctggtcaccgtctcctcaggtggtggtggttctggcggcggcggctccggtggtggtggttctgagctcgttgtgactcaggaaccttcactcaccgtatcacctggtggaacagtcacactcacttgtggctcctcgactggggctgttacatctggctactacccaaactgggtccaacaaaaaccaggtcaggcaccccgtggtctaataggtgggactaagttcctcgcccccggtactcctgccagattctcaggctccctgcttggaggcaaggctgccctcaccctctcaggggtacagccagaggatgaggcagaatattactgtgctctatggtacagcaaccgctgggtgttcggtggaggaaccaaactgactgtccta

SEQ ID NO: 117 - protein, 14 aa, Artificial Sequence
  CDR-L1 of E2M
RSSTGAVTSGYYPN

SEQ ID NO: 118 - protein, 7 aa, Artificial Sequence
  CDR-L2 of E2M
ATDMRPS

SEQ ID NO: 119 - protein, 9 aa, Artificial Sequence
  CDR-L3 of E2M
ALWYSNRWV

SEQ ID NO: 120 - protein, 5 aa, Artificial Sequence
  CDR-H1 of E2M
GYAMN

SEQ ID NO: 121 - protein, 19 aa, Artificial Sequence
  CDR-H2 of E2M
RIRSKYNNYATYYADSVKE

SEQ ID NO: 122 - protein, 14 aa, Artificial Sequence
  CDR-H3 of E2M
HRNFGNSYLSWFAY

SEQ ID NO: 123 - protein, 125 aa, Artificial Sequence
  VH of E2M
EVQLVESGGGLVQPGGSLKLSCAASGFTFNGYAMNWVRQAPGKGLEWVARIRSKYNNYATYYADSVKERFTISRDDSKNTAYLQMNNLKTEDTAVYYCVRHRNFGNSYLSWFAYWGQGTLVTVSS

SEQ ID NO: 124 - DNA, 375 bp, Artificial Sequence
  VH of E2M
gaggtgcagctggtcgagtctggaggaggattggtgcagcctggagggtcattgaaactctcatgtgcagcctctggattcaccttcaatggctacgccatgaactgggtccgccaggctccaggaaagggtttggaatgggttgctcgcataagaagtaaatataataattatgcaacatattatgccgattcagtgaaagagaggttcaccatctccagagatgattcaaaaaacactgcctatctacaaatgaacaacttgaaaactgaggacactgccgtgtactactgtgtgagacataggaacttcggtaatagctacttatcctggttcgcttactggggccaagggactctggtcaccgtctcctca

SEQ ID NO: 125 - protein, 109 aa, Artificial Sequence; identical to SEQ ID NO: 89
  VL of E2M

SEQ ID NO: 126 - DNA, 327 bp, Artificial Sequence; identical to SEQ ID NO: 90
  VL of E2M

SEQ ID NO: 127 - protein, 125 aa, Artificial Sequence
  VH-P of E2M
EVQLLESGGGLVQPGGSLKLSCAASGFTFNGYAMNWVRQAPGKGLEWVARIRSKYNNYATYYADSVKERFTISRDDSKNTAYLQMNNLKTEDTAVYYCVRHRNFGNSYLSWFAYWGQGTLVTVSS

SEQ ID NO: 128 - DNA, 375 bp, Artificial Sequence
  VH-P of E2M
gaggtgcagctgctcgagtctggaggaggattggtgcagcctggagggtcattgaaactctcatgtgcagcctctggattcaccttcaatggctacgccatgaactgggtccgccaggctccaggaaagggtttggaatgggttgctcgcataagaagtaaatataataattatgcaacatattatgccgattcagtgaaagagaggttcaccatctccagagatgattcaaaaaacactgcctatctacaaatgaacaacttgaaaactgaggacactgccgtgtactactgtgtgagacataggaacttcggtaatagctacttatcctggttcgcttactggggccaagggactctggtcaccgtctcctca

SEQ ID NO: 129 - protein, 109 aa, Artificial Sequence; identical to SEQ ID NO: 93
  VL-P of E2M

SEQ ID NO: 130 - DNA, 327 bp, Artificial Sequence; identical to SEQ ID NO: 94
  VL-P of E2M

SEQ ID NO: 131 - protein, 249 aa, Artificial Sequence
  VH-VL of E2M
EVQLVESGGGLVQPGGSLKLSCAASGFTFNGYAMNWVRQAPGKGLEWVARIRSKYNNYATYYADSVKERFTISRDDSKNTAYLQMNNLKTEDTAVYYCVRHRNFGNSYLSWFAYWGQGTLVTVSSGGGGSGGGGSGGGGSQTVVTQEPSLTVSPGGTVTLTCRSSTGAVTSGYYPNWVQQKPGQAPRGLIGATDMRPSGTPARFSGSLLGGKAALTLSGVQPEDEAEYYCALWYSNRWVFGGGTKLTVL

SEQ ID NO: 132 - DNA, 747 bp, Artificial Sequence
  VH-VL of E2M
gaggtgcagctggtcgagtctggaggaggattggtgcagcctggagggtcattgaaactctcatgtgcagcctctggattcaccttcaatggctacgccatgaactgggtccgccaggctccaggaaagggtttggaatgggttgctcgcataagaagtaaatataataattatgcaacatattatgccgattcagtgaaagagaggttcaccatctccagagatgattcaaaaaacactgcctatctacaaatgaacaacttgaaaactgaggacactgccgtgtactactgtgtgagacataggaacttcggtaatagctacttatcctggttcgcttactggggccaagggactctggtcaccgtctcctcaggtggtggtggttctggcggcggcggctccggtggtggtggttctcagactgttgtgactcaggaaccttcactcaccgtatcacctggtggaacagtcacactcacttgtcgctcctcgactggggctgttacatctggctactacccaaactgggtccaacaaaaaccaggtcaggcaccccgtggtctaataggtgccactgacatgaggccctctggtactcctgccagattctcaggctccctgcttggaggcaaggctgccctcaccctctcaggggtacagccagaggatgaggcagaatattactgtgctctatggtacagcaaccgctgggtgttcggtggaggaaccaaactgactgtccta

SEQ ID NO: 133 - protein, 249 aa, Artificial Sequence
  VH-VL-P of E2M
EVQLLESGGGLVQPGGSLKLSCAASGFTFNGYAMNWVRQAPGKGLEWVARIRSKYNNYATYYADSVKERFTISRDDSKNTAYLQMNNLKTEDTAVYYCVRHRNFGNSYLSWFAYWGQGTLVTVSSGGGGSGGGGSGGGGSELVVTQEPSLTVSPGGTVTLTCRSSTGAVTSGYYPNWVQQKPGQAPRGLIGATDMRPSGTPARFSGSLLGGKAALTLSGVQPEDEAEYYCALWYSNRWVFGGGTKLTVL

SEQ ID NO: 134 - DNA, 747 bp, Artificial Sequence
  VH-VL-P of E2M
gaggtgcagctgctcgagtctggaggaggattggtgcagcctggagggtcattgaaactctcatgtgcagcctctggattcaccttcaatggctacgccatgaactgggtccgccaggctccaggaaagggtttggaatgggttgctcgcataagaagtaaatataataattatgcaacatattatgccgattcagtgaaagagaggttcaccatctccagagatgattcaaaaaacactgcctatctacaaatgaacaacttgaaaactgaggacactgccgtgtactactgtgtgagacataggaacttcggtaatagctacttatcctggttcgcttactggggccaagggactctggtcaccgtctcctcaggtggtggtggttctggcggcggcggctccggtggtggtggttctgagctcgttgtgactcaggaaccttcactcaccgtatcacctggtggaacagtcacactcacttgtcgctcctcgactggggctgttacatctggctactacccaaactgggtccaacaaaaaccaggtcaggcaccccgtggtctaataggtgccactgacatgaggccctctggtactcctgccagattctcaggctccctgcttggaggcaaggctgccctcaccctctcaggggtacagccagaggatgaggcagaatattactgtgctctatggtacagcaaccgctgggtgttcggtggaggaaccaaactgactgtccta

SEQ ID NO: 135 - protein, 14 aa, Artificial Sequence
  CDR-L1 of F7O
GSSTGAVTSGYYPN

SEQ ID NO: 136 - protein, 7 aa, Artificial Sequence
  CDR-L2 of F7O
GTKFLAP

SEQ ID NO: 137 - protein, 9 aa, Artificial Sequence
  CDR-L3 of F7O
ALWYSNRWV

SEQ ID NO: 138 - protein, 5 aa, Artificial Sequence
  CDR-H1 of F7O
VYAMN

SEQ ID NO: 139 - protein, 19 aa, Artificial Sequence
  CDR-H2 of F7O
RIRSKYNNYATYYADSVKK

SEQ ID NO: 140 - protein, 14 aa, Artificial Sequence
  CDR-H3 of F7O
HGNFGNSYISWWAY

SEQ ID NO: 141 - protein, 125 aa, Artificial Sequence
  VH of F7O
EVQLVESGGGLVQPGGSLKLSCAASGFTFNVYAMNWVRQAPGKGLEWVARIRSKYNNYATYYADSVKKRFTISRDDSKNTAYLQMNNLKTEDTAVYYCVRHGNFGNSYISWWAYWGQGTLVTVSS

SEQ ID NO: 142 - DNA, 375 bp, Artificial Sequence
  VH of F7O
gaggtgcagctggtcgagtctggaggaggattggtgcagcctggagggtcattgaaactctcatgtgcagcctctggattcaccttcaatgtgtacgccatgaactgggtccgccaggctccaggaaagggtttggaatgggttgctcgcataagaagtaaatataataattatgcaacatattatgccgattcagtgaaaaagaggttcaccatctccagagatgattcaaaaaacactgcctatctacaaatgaacaacttgaaaactgaggacactgccgtgtactactgtgtgagacatgggaacttcggtaatagctacatatcctggtgggcttactggggccaagggactctggtcaccgtctcctca

SEQ ID NO: 143 - protein, 109 aa, Artificial Sequence; identical to SEQ ID NO: 17
  VL of F7O

SEQ ID NO: 144 - DNA, 327 bp, Artificial Sequence; identical to SEQ ID NO: 18
  VL of F7O

SEQ ID NO: 145 - protein, 125 aa, Artificial Sequence
  VH-P of F7O
EVQLLESGGGLVQPGGSLKLSCAASGFTFNVYAMNWVRQAPGKGLEWVARIRSKYNNYATYYADSVKKRFTISRDDSKNTAYLQMNNLKTEDTAVYYCVRHGNFGNSYISWWAYWGQGTLVTVSS

SEQ ID NO: 146 - DNA, 375 bp, Artificial Sequence
  VH-P of F7O
gaggtgcagctgctcgagtctggaggaggattggtgcagcctggagggtcattgaaactctcatgtgcagcctctggattcaccttcaatgtgtacgccatgaactgggtccgccaggctccaggaaagggtttggaatgggttgctcgcataagaagtaaatataataattatgcaacatattatgccgattcagtgaaaaagaggttcaccatctccagagatgattcaaaaaacactgcctatctacaaatgaacaacttgaaaactgaggacactgccgtgtactactgtgtgagacatgggaacttcggtaatagctacatatcctggtgggcttactggggccaagggactctggtcaccgtctcctca

SEQ ID NO: 147 - protein, 109 aa, Artificial Sequence; identical to SEQ ID NO: 21
  VL-P of F7O

SEQ ID NO: 148 - DNA, 327 bp, Artificial Sequence; identical to SEQ ID NO: 22
  VL-P of F7O

SEQ ID NO: 149 - protein, 249 aa, Artificial Sequence
  VH-VL of F7O
EVQLVESGGGLVQPGGSLKLSCAASGFTFNVYAMNWVRQAPGKGLEWVARIRSKYNNYATYYADSVKKRFTISRDDSKNTAYLQMNNLKTEDTAVYYCVRHGNFGNSYISWWAYWGQGTLVTVSSGGGGSGGGGSGGGGSQTVVTQEPSLTVSPGGTVTLTCGSSTGAVTSGYYPNWVQQKPGQAPRGLIGGTKFLAPGTPARFSGSLLGGKAALTLSGVQPEDEAEYYCALWYSNRWVFGGGTKLTVL

SEQ ID NO: 150 - DNA, 747 bp, Artificial Sequence
  VH-VL of F7O
gaggtgcagctggtcgagtctggaggaggattggtgcagcctggagggtcattgaaactctcatgtgcagcctctggattcaccttcaatgtgtacgccatgaactgggtccgccaggctccaggaaagggtttggaatgggttgctcgcataagaagtaaatataataattatgcaacatattatgccgattcagtgaaaaagaggttcaccatctccagagatgattcaaaaaacactgcctatctacaaatgaacaacttgaaaactgaggacactgccgtgtactactgtgtgagacatgggaacttcggtaatagctacatatcctggtgggcttactggggccaagggactctggtcaccgtctcctcaggtggtggtggttctggcggcggcggctccggtggtggtggttctcagactgttgtgactcaggaaccttcactcaccgtatcacctggtggaacagtcacactcacttgtggctcctcgactggggctgttacatctggctactacccaaactgggtccaacaaaaaccaggtcaggcaccccgtggtctaataggtgggactaagttcctcgcccccggtactcctgccagattctcaggctccctgcttggaggcaaggctgccctcaccctctcaggggtacagccagaggatgaggcagaatattactgtgctctatggtacagcaaccgctgggtgttcggtggaggaaccaaactgactgtccta

SEQ ID NO: 151 - protein, 249 aa, Artificial Sequence
  VH-VL-P of F7O
EVQLLESGGGLVQPGGSLKLSCAASGFTFNVYAMNWVRQAPGKGLEWVARIRSKYNNYATYYADSVKKRFTISRDDSKNTAYLQMNNLKTEDTAVYYCVRHGNFGNSYISWWAYWGQGTLVTVSSGGGGSGGGGSGGGGSELVVTQEPSLTVSPGGTVTLTCGSSTGAVTSGYYPNWVQQKPGQAPRGLIGGTKFLAPGTPARFSGSLLGGKAALTLSGVQPEDEAEYYCALWYSNRWVFGGGTKLTVL

SEQ ID NO: 152 - DNA, 747 bp, Artificial Sequence
  VH-VL-P of F7O
gaggtgcagctgctcgagtctggaggaggattggtgcagcctggagggtcattgaaactctcatgtgcagcctctggattcaccttcaatgtgtacgccatgaactgggtccgccaggctccaggaaagggtttggaatgggttgctcgcataagaagtaaatataataattatgcaacatattatgccgattcagtgaaaaagaggttcaccatctccagagatgattcaaaaaacactgcctatctacaaatgaacaacttgaaaactgaggacactgccgtgtactactgtgtgagacatgggaacttcggtaatagctacatatcctggtgggcttactggggccaagggactctggtcaccgtctcctcaggtggtggtggttctggcggcggcggctccggtggtggtggttctgagctcgttgtgactcaggaaccttcactcaccgtatcacctggtggaacagtcacactcacttgtggctcctcgactggggctgttacatctggctactacccaaactgggtccaacaaaaaccaggtcaggcaccccgtggtctaataggtgggactaagttcctcgcccccggtactcctgccagattctcaggctccctgcttggaggcaaggctgccctcaccctctcaggggtacagccagaggatgaggcagaatattactgtgctctatggtacagcaaccgctgggtgttcggtggaggaaccaaactgactgtccta

SEQ ID NO: 153 - protein, 14 aa, Artificial Sequence
  CDR-L1 of F12Q
GSSTGAVTSGNYPN

SEQ ID NO: 154 - protein, 7 aa, Artificial Sequence
  CDR-L2 of F12Q
GTKFLAP

SEQ ID NO: 155 - protein, 9 aa, Artificial Sequence
  CDR-L3 of F12Q
VLWYSNRWV

SEQ ID NO: 156 - protein, 5 aa, Artificial Sequence
  CDR-H1 of F12Q
SYAMN

SEQ ID NO: 157 - protein, 19 aa, Artificial Sequence
  CDR-H2 of F12Q
RIRSKYNNYATYYADSVKG

SEQ ID NO: 158 - protein, 14 aa, Artificial Sequence
  CDR-H3 of F12Q
HGNFGNSYVSWWAY

SEQ ID NO: 159 - protein, 125 aa, Artificial Sequence
  VH of F12Q
EVQLVESGGGLVQPGGSLKLSCAASGFTFNSYAMNWVRQAPGKGLEWVARIRSKYNNYATYYADSVKGRFTISRDDSKNTAYLQMNNLKTEDTAVYYCVRHGNFGNSYVSWWAYWGQGTLVTVSS

SEQ ID NO: 160 - DNA, 375 bp, Artificial Sequence
  VH of F12Q
gaggtgcagctggtcgagtctggaggaggattggtgcagcctggagggtcattgaaactctcatgtgcagcctctggattcaccttcaatagctacgccatgaactgggtccgccaggctccaggaaagggtttggaatgggttgctcgcataagaagtaaatataataattatgcaacatattatgccgattcagtgaaaggcaggttcaccatctccagagatgattcaaaaaacactgcctatctacaaatgaacaacttgaaaactgaggacactgccgtgtactactgtgtgagacatgggaacttcggtaatagctacgtttcctggtgggcttactggggccaagggactctggtcaccgtctcctca

SEQ ID NO: 161 - protein, 109 aa, Artificial Sequence
  VL of F12Q
QTVVTQEPSLTVSPGGTVTLTCGSSTGAVTSGNYPNWVQQKPGQAPRGLIGGTKFLAPGTPARFSGSLLGGKAALTLSGVQPEDEAEYYCVLWYSNRWVFGGGTKLTVL

SEQ ID NO: 162 - DNA, 327 bp, Artificial Sequence
  VL of F12Q
cagactgttgtgactcaggaaccttcactcaccgtatcacctggtggaacagtcacactcacttgtggctcctcgactggggctgttacatctggcaactacccaaactgggtccaacaaaaaccaggtcaggcaccccgtggtctaataggtgggactaagttcctcgcccccggtactcctgccagattctcaggctccctgcttggaggcaaggctgccctcaccctctcaggggtacagccagaggatgaggcagaatattactgtgttctatggtacagcaaccgctgggtgttcggtggaggaaccaaactgactgtccta

SEQ ID NO: 163 - protein, 125 aa, Artificial Sequence
  VH-P of F12Q
EVQLLESGGGLVQPGGSLKLSCAASGFTFNSYAMNWVRQAPGKGLEWVARIRSKYNNYATYYADSVKGRFTISRDDSKNTAYLQMNNLKTEDTAVYYCVRHGNFGNSYVSWWAYWGQGTLVTVSS

SEQ ID NO: 164 - DNA, 375 bp, Artificial Sequence
  VH-P of F12Q
gaggtgcagctgctcgagtctggaggaggattggtgcagcctggagggtcattgaaactctcatgtgcagcctctggattcaccttcaatagctacgccatgaactgggtccgccaggctccaggaaagggtttggaatgggttgctcgcataagaagtaaatataataattatgcaacatattatgccgattcagtgaaaggcaggttcaccatctccagagatgattcaaaaaacactgcctatctacaaatgaacaacttgaaaactgaggacactgccgtgtactactgtgtgagacatgggaacttcggtaatagctacgtttcctggtgggcttactggggccaagggactctggtcaccgtctcctca

SEQ ID NO: 165 - protein, 109 aa, Artificial Sequence
  VL-P of F12Q
ELVVTQEPSLTVSPGGTVTLTCGSSTGAVTSGNYPNWVQQKPGQAPRGLIGGTKFLAPGTPARFSGSLLGGKAALTLSGVQPEDEAEYYCVLWYSNRWVFGGGTKLTVL

SEQ ID NO: 166 - DNA, 327 bp, Artificial Sequence
  VL-P of F12Q
gagctcgttgtgactcaggaaccttcactcaccgtatcacctggtggaacagtcacactcacttgtggctcctcgactggggctgttacatctggcaactacccaaactgggtccaacaaaaaccaggtcaggcaccccgtggtctaataggtgggactaagttcctcgcccccggtactcctgccagattctcaggctccctgcttggaggcaaggctgccctcaccctctcaggggtacagccagaggatgaggcagaatattactgtgttctatggtacagcaaccgctgggtgttcggtggaggaaccaaactgactgtccta

SEQ ID NO: 167 - protein, 249 aa, Artificial Sequence
  VH-VL of F12Q
EVQLVESGGGLVQPGGSLKLSCAASGFTFNSYAMNWVRQAPGKGLEWVARIRSKYNNYATYYADSVKGRFTISRDDSKNTAYLQMNNLKTEDTAVYYCVRHGNFGNSYVSWWAYWGQGTLVTVSSGGGGSGGGGSGGGGSQTVVTQEPSLTVSPGGTVTLTCGSSTGAVTSGNYPNWVQQKPGQAPRGLIGGTKFLAPGTPARFSGSLLGGKAALTLSGVQPEDEAEYYCVLWYSNRWVFGGGTKLTVL

SEQ ID NO: 168 - DNA, 747 bp, Artificial Sequence
  VH-VL of F12Q
gaggtgcagctggtcgagtctggaggaggattggtgcagcctggagggtcattgaaactctcatgtgcagcctctggattcaccttcaatagctacgccatgaactgggtccgccaggctccaggaaagggtttggaatgggttgctcgcataagaagtaaatataataattatgcaacatattatgccgattcagtgaaaggcaggttcaccatctccagagatgattcaaaaaacactgcctatctacaaatgaacaacttgaaaactgaggacactgccgtgtactactgtgtgagacatgggaacttcggtaatagctacgtttcctggtgggcttactggggccaagggactctggtcaccgtctcctcaggtggtggtggttctggcggcggcggctccggtggtggtggttctcagactgttgtgactcaggaaccttcactcaccgtatcacctggtggaacagtcacactcacttgtggctcctcgactggggctgttacatctggcaactacccaaactgggtccaacaaaaaccaggtcaggcaccccgtggtctaataggtgggactaagttcctcgcccccggtactcctgccagattctcaggctccctgcttggaggcaaggctgccctcaccctctcaggggtacagccagaggatgaggcagaatattactgtgttctatggtacagcaaccgctgggtgttcggtggaggaaccaaactgactgtccta

SEQ ID NO: 169 - protein, 249 aa, Artificial Sequence
  VH-VL-P of F12Q
EVQLLESGGGLVQPGGSLKLSCAASGFTFNSYAMNWVRQAPGKGLEWVARIRSKYNNYATYYADSVKGRFTISRDDSKNTAYLQMNNLKTEDTAVYYCVRHGNFGNSYVSWWAYWGQGTLVTVSSGGGGSGGGGSGGGGSELVVTQEPSLTVSPGGTVTLTCGSSTGAVTSGNYPNWVQQKPGQAPRGLIGGTKFLAPGTPARFSGSLLGGKAALTLSGVQPEDEAEYYCVLWYSNRWVFGGGTKLTVL

SEQ ID NO: 170 - DNA, 747 bp, Artificial Sequence
  VH-VL-P of F12Q
gaggtgcagctgctcgagtctggaggaggattggtgcagcctggagggtcattgaaactctcatgtgcagcctctggattcaccttcaatagctacgccatgaactgggtccgccaggctccaggaaagggtttggaatgggttgctcgcataagaagtaaatataataattatgcaacatattatgccgattcagtgaaaggcaggttcaccatctccagagatgattcaaaaaacactgcctatctacaaatgaacaacttgaaaactgaggacactgccgtgtactactgtgtgagacatgggaacttcggtaatagctacgtttcctggtgggcttactggggccaagggactctggtcaccgtctcctcaggtggtggtggttctggcggcggcggctccggtggtggtggttctgagctcgttgtgactcaggaaccttcactcaccgtatcacctggtggaacagtcacactcacttgtggctcctcgactggggctgttacatctggcaactacccaaactgggtccaacaaaaaccaggtcaggcaccccgtggtctaataggtgggactaagttcctcgcccccggtactcctgccagattctcaggctccctgcttggaggcaaggctgccctcaccctctcaggggtacagccagaggatgaggcagaatattactgtgttctatggtacagcaaccgctgggtgttcggtggaggaaccaaactgactgtccta

SEQ ID NO: 171 - protein, 14 aa, Artificial Sequence
  CDR-L1 of I2C
GSSTGAVTSGNYPN

SEQ ID NO: 172 - protein, 7 aa, Artificial Sequence
  CDR-L2 of I2C
GTKFLAP

SEQ ID NO: 173 - protein, 9 aa, Artificial Sequence
  CDR-L3 of I2C
VLWYSNRWV

SEQ ID NO: 174 - protein, 5 aa, Artificial Sequence
  CDR-H1 of I2C
KYAMN

SEQ ID NO: 175 - protein, 19 aa, Artificial Sequence
  CDR-H2 of I2C
RIRSKYNNYATYYADSVKD

SEQ ID NO: 176 - protein, 14 aa, Artificial Sequence
  CDR-H3 of I2C
HGNFGNSYISYWAY

SEQ ID NO: 177 - protein, 125 aa, Artificial Sequence; identical to SEQ ID NO: 33
  VH of I2C

SEQ ID NO: 178 - DNA, 375 bp, Artificial Sequence; identical to SEQ ID NO: 34
  VH of I2C

SEQ ID NO: 179 - protein, 109 aa, Artificial Sequence; identical to SEQ ID NO: 161
  VL of I2C

SEQ ID NO: 180 - DNA, 327 bp, Artificial Sequence; identical to SEQ ID NO: 162
  VL of I2C

SEQ ID NO: 181 - protein, 125 aa, Artificial Sequence; identical to SEQ ID NO: 37
  VH-P of I2C

SEQ ID NO: 182 - DNA, 375 bp, Artificial Sequence; identical to SEQ ID NO: 38
  VH-P of I2C

SEQ ID NO: 183 - protein, 109 aa, Artificial Sequence; identical to SEQ ID NO: 165
  VL-P of I2C

SEQ ID NO: 184 - DNA, 327 bp, Artificial Sequence; identical to SEQ ID NO: 166
  VL-P of I2C

SEQ ID NO: 185 - protein, 249 aa, Artificial Sequence
  VH-VL of I2C
EVQLVESGGGLVQPGGSLKLSCAASGFTFNKYAMNWVRQAPGKGLEWVARIRSKYNNYATYYADSVKDRFTISRDDSKNTAYLQMNNLKTEDTAVYYCVRHGNFGNSYISYWAYWGQGTLVTVSSGGGGSGGGGSGGGGSQTVVTQEPSLTVSPGGTVTLTCGSSTGAVTSGNYPNWVQQKPGQAPRGLIGGTKFLAPGTPARFSGSLLGGKAALTLSGVQPEDEAEYYCVLWYSNRWVFGGGTKLTVL

SEQ ID NO: 186 - DNA, 747 bp, Artificial Sequence
  VH-VL of I2C
gaggtgcagctggtcgagtctggaggaggattggtgcagcctggagggtcattgaaactctcatgtgcagcctctggattcaccttcaataagtacgccatgaactgggtccgccaggctccaggaaagggtttggaatgggttgctcgcataagaagtaaatataataattatgcaacatattatgccgattcagtgaaagacaggttcaccatctccagagatgattcaaaaaacactgcctatctacaaatgaacaacttgaaaactgaggacactgccgtgtactactgtgtgagacatgggaacttcggtaatagctacatatcctactgggcttactggggccaagggactctggtcaccgtctcctcaggtggtggtggttctggcggcggcggctccggtggtggtggttctcagactgttgtgactcaggaaccttcactcaccgtatcacctggtggaacagtcacactcacttgtggctcctcgactggggctgttacatctggcaactacccaaactgggtccaacaaaaaccaggtcaggcaccccgtggtctaataggtgggactaagttcctcgcccccggtactcctgccagattctcaggctccctgcttggaggcaaggctgccctcaccctctcaggggtacagccagaggatgaggcagaatattactgtgttctatggtacagcaaccgctgggtgttcggtggaggaaccaaactgactgtccta

SEQ ID NO: 187 - protein, 249 aa, Artificial Sequence
  VH-VL-P of I2C
EVQLLESGGGLVQPGGSLKLSCAASGFTFNKYAMNWVRQAPGKGLEWVARIRSKYNNYATYYADSVKDRFTISRDDSKNTAYLQMNNLKTEDTAVYYCVRHGNFGNSYISYWAYWGQGTLVTVSSGGGGSGGGGSGGGGSELVVTQEPSLTVSPGGTVTLTCGSSTGAVTSGNYPNWVQQKPGQAPRGLIGGTKFLAPGTPARFSGSLLGGKAALTLSGVQPEDEAEYYCVLWYSNRWVFGGGTKLTVL

SEQ ID NO: 188 - DNA, 747 bp, Artificial Sequence
  VH-VL-P of I2C
gaggtgcagctgctcgagtctggaggaggattggtgcagcctggagggtcattgaaactctcatgtgcagcctctggattcaccttcaataagtacgccatgaactgggtccgccaggctccaggaaagggtttggaatgggttgctcgcataagaagtaaatataataattatgcaacatattatgccgattcagtgaaagacaggttcaccatctccagagatgattcaaaaaacactgcctatctacaaatgaacaacttgaaaactgaggacactgccgtgtactactgtgtgagacatgggaacttcggtaatagctacatatcctactgggcttactggggccaagggactctggtcaccgtctcctcaggtggtggtggttctggcggcggcggctccggtggtggtggttctgagctcgttgtgactcaggaaccttcactcaccgtatcacctggtggaacagtcacactcacttgtggctcctcgactggggctgttacatctggcaactacccaaactgggtccaacaaaaaccaggtcaggcaccccgtggtctaataggtgggactaagttcctcgcccccggtactcctgccagattctcaggctccctgcttggaggcaaggctgccctcaccctctcaggggtacagccagaggatgaggcagaatattactgtgttctatggtacagcaaccgctgggtgttcggtggaggaaccaaactgactgtccta

SEQ ID NO: 189 - protein, 500 aa, Artificial Sequence
  MCSP-G4 VH-VL x H2C VH-VL
QVQLVQSGAEVKRPGASMKVSCKASGYTFTNYYIHWVRQAPGQGLEWMGWINPNSGATNYAQKFQGRVTMTRDTSTSTVYMELSSLRSEDTAVYYCAKSWVSWFASWGQGTLVTVSSGGGGSGGGGSGGGGSDIVMTQSPDSLAVSLGERATINCKSSQSVLNSSNNRNYLAWYQQKPGQPPKLLIYWASTRESGVPDRFSGSGSGTDFTLTISGLQAEDVAVYYCQQHYSTPFTFGPGTKVDIKSGGGGSEVQLVESGGGLVQPGGSLKLSCAASGFTFNKYAMNWVRQAPGKGLEWVARIRSKYNNYATYYADSVKDRFTISRDDSKNTAYLQMNNLKTEDTAVYYCVRHGNFGNSYISYWAYWGQGTLVTVSSGGGGSGGGGSGGGGSQTVVTQEPSLTVSPGGTVTLTCGSSTGAVTSGYYPNWVQQKPGQAPRGLIGGTKFLAPGTPARFSGSLLGGKAALTLSGVQPEDEAEYYCALWYSNRWVFGGGTKLTVL

SEQ ID NO: 190 - DNA, 1500 bp, Artificial Sequence
  MCSP-G4 VH-VL x H2C VH-VL
caggtgcagctggtccagtctggggctgaggtgaagaggcctggggcctcaatgaaggtctcctgcaaggcttctgggtacaccttcaccaactactatatacactgggtgcgacaggcccctggacaaggtcttgagtggatgggttggatcaaccctaacagtggtgccacaaactatgcacagaagttccagggcagagtcaccatgaccagggacacgtccacgagcacagtctacatggagctgagcagcctgagatctgaggacacggccgtgtattactgtgcgaaatcctgggtctcctggtttgcttcctggggtcaaggaaccttggtcaccgtctcctcaggtggtggtggttctggcggcggcggctccggtggtggtggttctgatatcgtgatgacccagtctccagactccctggctgtgtctctgggcgagagggccaccatcaactgcaagtccagccagagtgttttaaacagctccaacaataggaactacttagcttggtaccagcagaaaccaggacagcctcctaagctgctcatttactgggcatctacccgggaatccggggtccctgaccgattcagtggcagcgggtctgggacagatttcactctcaccatcagtggcctgcaggctgaagatgtggcagtttattactgtcagcaacattatagtactccattcacttttggccctgggaccaaagtggatatcaaatccggaggtggtggatccgaggtgcagctggtcgagtctggaggaggattggtgcagcctggagggtcattgaaactctcatgtgcagcctctggattcaccttcaataagtacgccatgaactgggtccgccaggctccaggaaagggtttggaatgggttgctcgcataagaagtaaatataataattatgcaacatattatgccgattcagtgaaagacaggttcaccatctccagagatgattcaaaaaacactgcctatctacaaatgaacaacttgaaaactgaggacactgccgtgtactactgtgtgagacatgggaacttcggtaatagctacatatcctactgggcttactggggccaagggactctggtcaccgtctcctcaggtggtggtggttctggcggcggcggctccggtggtggtggttctcagactgttgtgactcaggaaccttcactcaccgtatcacctggtggaacagtcacactcacttgtggctcctcgactggggctgttacatctggctactacccaaactgggtccaacaaaaaccaggtcaggcaccccgtggtctaataggtgggactaagttcctcgcccccggtactcctgccagattctcaggctccctgcttggaggcaaggctgccctcaccctctcaggggtacagccagaggatgaggcagaatattactgtgctctatggtacagcaaccgctgggtgttcggtggaggaaccaaactgactgtccta

SEQ ID NO: 191 - protein, 500 aa, Artificial Sequence
  MCSP-G4 VH-VL x F12Q VH-VL
QVQLVQSGAEVKRPGASMKVSCKASGYTFTNYYIHWVRQAPGQGLEWMGWINPNSGATNYAQKFQGRVTMTRDTSTSTVYMELSSLRSEDTAVYYCAKSWVSWFASWGQGTLVTVSSGGGGSGGGGSGGGGSDIVMTQSPDSLAVSLGERATINCKSSQSVLNSSNNRNYLAWYQQKPGQPPKLLIYWASTRESGVPDRFSGSGSGTDFTLTISGLQAEDVAVYYCQQHYSTPFTFGPGTKVDIKSGGGGSEVQLVESGGGLVQPGGSLKLSCAASGFTFNSYAMNWVRQAPGKGLEWVARIRSKYNNYATYYADSVKGRFTISRDDSKNTAYLQMNNLKTEDTAVYYCVRHGNFGNSYVSWWAYWGQGTLVTVSSGGGGSGGGGSGGGGSQTVVTQEPSLTVSPGGTVTLTCGSSTGAVTSGNYPNWVQQKPGQAPRGLIGGTKFLAPGTPARFSGSLLGGKAALTLSGVQPEDEAEYYCVLWYSNRWVFGGGTKLTVL

SEQ ID NO: 192 - DNA, 1500 bp, Artificial Sequence
  MCSP-G4 VH-VL x F12Q VH-VL
caggtgcagctggtccagtctggggctgaggtgaagaggcctggggcctcaatgaaggtctcctgcaaggcttctgggtacaccttcaccaactactatatacactgggtgcgacaggcccctggacaaggtcttgagtggatgggttggatcaaccctaacagtggtgccacaaactatgcacagaagttccagggcagagtcaccatgaccagggacacgtccacgagcacagtctacatggagctgagcagcctgagatctgaggacacggccgtgtattactgtgcgaaatcctgggtctcctggtttgcttcctggggtcaaggaaccttggtcaccgtctcctcaggtggtggtggttctggcggcggcggctccggtggtggtggttctgatatcgtgatgacccagtctccagactccctggctgtgtctctgggcgagagggccaccatcaactgcaagtccagccagagtgttttaaacagctccaacaataggaactacttagcttggtaccagcagaaaccaggacagcctcctaagctgctcatttactgggcatctacccgggaatccggggtccctgaccgattcagtggcagcgggtctgggacagatttcactctcaccatcagtggcctgcaggctgaagatgtggcagtttattactgtcagcaacattatagtactccattcacttttggccctgggaccaaagtggatatcaaatccggaggtggtggatccgaggtgcagctggtcgagtctggaggaggattggtgcagcctggagggtcattgaaactctcatgtgcagcctctggattcaccttcaatagctacgccatgaactgggtccgccaggctccaggaaagggtttggaatgggttgctcgcataagaagtaaatataataattatgcaacatattatgccgattcagtgaaaggcaggttcaccatctccagagatgattcaaaaaacactgcctatctacaaatgaacaacttgaaaactgaggacactgccgtgtactactgtgtgagacatgggaacttcggtaatagctacgtttcctggtgggcttactggggccaagggactctggtcaccgtctcctcaggtggtggtggttctggcggcggcggctccggtggtggtggttctcagactgttgtgactcaggaaccttcactcaccgtatcacctggtggaacagtcacactcacttgtggctcctcgactggggctgttacatctggcaactacccaaactgggtccaacaaaaaccaggtcaggcaccccgtggtctaataggtgggactaagttcctcgcccccggtactcctgccagattctcaggctccctgcttggaggcaaggctgccctcaccctctcaggggtacagccagaggatgaggcagaatattactgtgttctatggtacagcaaccgctgggtgttcggtggaggaaccaaactgactgtccta

SEQ ID NO: 193 - protein, 500 aa, Artificial Sequence
  MCSP-G4 VH-VL-P x F6A VH-VL-P
QVQLVQSGAEVKRPGASMKVSCKASGYTFTNYYIHWVRQAPGQGLEWMGWINPNSGATNYAQKFQGRVTMTRDTSTSTVYMELSSLRSEDTAVYYCAKSWVSWFASWGQGTLVTVSSGGGGSGGGGSGGGGSDIVMTQSPDSLAVSLGERATINCKSSQSVLNSSNNRNYLAWYQQKPGQPPKLLIYWASTRESGVPDRFSGSGSGTDFTLTISGLQAEDVAVYYCQQHYSTPFTFGPGTKVDIKSGGGGSEVQLVESGGGLVQPGGSLKLSCAASGFTFNKYAMNWVRQAPGKGLEWVARIRSKYNNYATYYADSVKDRFTISRDDSKNTAYLQMNNLKTEDTAVYYCVRHGNFGNSYISYWAYWGQGTLVTVSSGGGGSGGGGSGGGGSQTVVTQEPSLTVSPGGTVTLTCGSSTGAVTSGNYPNWVQQKPGQAPRGLIGGTKFLAPGTPARFSGSLLGGKAALTLSGVQPEDEAEYYCVLWYSNRWVFGGGTKLTVL

SEQ ID NO: 194 - DNA, 1500 bp, Artificial Sequence
  MCSP-G4 VH-VL-P x F6A VH-VL-P
caggtgcagctggtccagtctggggctgaggtgaagaggcctggggcctcaatgaaggtctcctgcaaggcttctgggtacaccttcaccaactactatatacactgggtgcgacaggcccctggacaaggtcttgagtggatgggttggatcaaccctaacagtggtgccacaaactatgcacagaagttccagggcagagtcaccatgaccagggacacgtccacgagcacagtctacatggagctgagcagcctgagatctgaggacacggccgtgtattactgtgcgaaatcctgggtctcctggtttgcttcctggggtcaaggaaccttggtcaccgtctcctcaggtggtggtggttctggcggcggcggctccggtggtggtggttctgatatcgtgatgacccagtctccagactccctggctgtgtctctgggcgagagggccaccatcaactgcaagtccagccagagtgttttaaacagctccaacaataggaactacttagcttggtaccagcagaaaccaggacagcctcctaagctgctcatttactgggcatctacccgggaatccggggtccctgaccgattcagtggcagcgggtctgggacagatttcactctcaccatcagtggcctgcaggctgaagatgtggcagtttattactgtcagcaacattatagtactccattcacttttggccctgggaccaaagtggatatcaaatccggaggtggtggatccgaggtgcagctggtcgagtctggaggaggattggtgcagcctggagggtcattgaaactctcatgtgcagcctctggattcaccttcaataagtacgccatgaactgggtccgccaggctccaggaaagggtttggaatgggttgctcgcataagaagtaaatataataattatgcaacatattatgccgattcagtgaaagacaggttcaccatctccagagatgattcaaaaaacactgcctatctacaaatgaacaacttgaaaactgaggacactgccgtgtactactgtgtgagacatgggaacttcggtaatagctacatatcctactgggcttactggggccaagggactctggtcaccgtctcctcaggtggtggtggttctggcggcggcggctccggtggtggtggttctcagactgttgtgactcaggaaccttcactcaccgtatcacctggtggaacagtcacactcacttgtggctcctcgactggggctgttacatctggcaactacccaaactgggtccaacaaaaaccaggtcaggcaccccgtggtctaataggtgggactaagttcctcgcccccggtactcctgccagattctcaggctccctgcttggaggcaaggctgccctcaccctctcaggggtacagccagaggatgaggcagaatattactgtgttctatggtacagcaaccgctgggtgttcggtggaggaaccaaactgactgtccta

SEQ ID NO: 195 - protein, 500 aa, Artificial Sequence
  MCSP-G4 VH-VL-P x F6A VH-VL-P
QVQLVQSGAEVKRPGASMKVSCKASGYTFTNYYIHWVRQAPGQGLEWMGWINPNSGATNYAQKFQGRVTMTRDTSTSTVYMELSSLRSEDTAVYYCAKSWVSWFASWGQGTLVTVSSGGGGSGGGGSGGGGSELVMTQSPDSLAVSLGERATINCKSSQSVLNSSNNRNYLAWYQQKPGQPPKLLIYWASTRESGVPDRFSGSGSGTDFTLTISGLQAEDVAVYYCQQHYSTPFTFGPGTKVDIKSGGGGSEVQLLESGGGLVQPGGSLKLSCAASGFTFNIYAMNWVRQAPGKGLEWVARIRSKYNNYATYYADSVKSRFTISRDDSKNTAYLQMNNLKTEDTAVYYCVRHGNFGNSYVSFFAYWGQGTLVTVSSGGGGSGGGGSGGGGSELVVTQEPSLTVSPGGTVTLTCGSSTGAVTSGYYPNWVQQKPGQAPRGLIGGTKFLAPGTPARFSGSLLGGKAALTLSGVQPEDEAEYYCALWYSNRWVFGGGTKLTVL

SEQ ID NO: 196 - DNA, 1500 bp, Artificial Sequence
  MCSP-G4 VH-VL-P x F6A VH-VL-P
caggtgcagctggtccagtctggggctgaggtgaagaggcctggggcctcaatgaaggtctcctgcaaggcttctgggtacaccttcaccaactactatatacactgggtgcgacaggcccctggacaaggtcttgagtggatgggttggatcaaccctaacagtggtgccacaaactatgcacagaagttccagggcagagtcaccatgaccagggacacgtccacgagcacagtctacatggagctgagcagcctgagatctgaggacacggccgtgtattactgtgcgaaatcctgggtctcctggtttgcttcctggggtcaaggaaccttggtcaccgtctcctcaggtggtggtggttctggcggcggcggctccggtggtggtggttctgagctcgtgatgacccagtctccagactccctggctgtgtctctgggcgagagggccaccatcaactgcaagtccagccagagtgttttaaacagctccaacaataggaactacttagcttggtaccagcagaaaccaggacagcctcctaagctgctcatttactgggcatctacccgggaatccggggtccctgaccgattcagtggcagcgggtctgggacagatttcactctcaccatcagtggcctgcaggctgaagatgtggcagtttattactgtcagcaacattatagtactccattcacttttggccctgggaccaaagtggatatcaaatccggaggtggtggatccgaggtgcagctgctcgagtctggaggaggattggtgcagcctggagggtcattgaaactctcatgtgcagcctctggattcaccttcaatatctacgccatgaactgggtccgccaggctccaggaaagggtttggaatgggttgctcgcataagaagtaaatataataattatgcaacatattatgccgattcagtgaaaagcaggttcaccatctccagagatgattcaaaaaacactgcctatctacaaatgaacaacttgaaaactgaggacactgccgtgtactactgtgtgagacatgggaacttcggtaatagctacgtatccttcttcgcttactggggccaagggactctggtcaccgtctcctcaggtggtggtggttctggcggcggcggctccggtggtggtggttctgagctcgttgtgactcaggaaccttcactcaccgtatcacctggtggaacagtcacactcacttgtggctcctcgactggggctgttacatctggctactacccaaactgggtccaacaaaaaccaggtcaggcaccccgtggtctaataggtgggactaagttcctcgcccccggtactcctgccagattctcaggctccctgcttggaggcaaggctgccctcaccctctcaggggtacagccagaggatgaggcagaatattactgtgctctatggtacagcaaccgctgggtgttcggtggaggaaccaaactgactgtccta

SEQ ID NO: 197 - protein, 500 aa, Artificial Sequence
  MCSP-G4 VH-VL-P x H2C VH-VL-P
QVQLVQSGAEVKRPGASMKVSCKASGYTFTNYYIHWVRQAPGQGLEWMGWINPNSGATNYAQKFQGRVTMTRDTSTSTVYMELSSLRSEDTAVYYCAKSWVSWFASWGQGTLVTVSSGGGGSGGGGSGGGGSELVMTQSPDSLAVSLGERATINCKSSQSVLNSSNNRNYLAWYQQKPGQPPKLLIYWASTRESGVPDRFSGSGSGTDFTLTISGLQAEDVAVYYCQQHYSTPFTFGPGTKVDIKSGGGGSEVQLLESGGGLVQPGGSLKLSCAASGFTFNKYAMNWVRQAPGKGLEWVARIRSKYNNYATYYADSVKDRFTISRDDSKNTAYLQMNNLKTEDTAVYYCVRHGNFGNSYISYWAYWGQGTLVTVSSGGGGSGGGGSGGGGSELVVTQEPSLTVSPGGTVTLTCGSSTGAVTSGYYPNWVQQKPGQAPRGLIGGTKFLAPGTPARFSGSLLGGKAALTLSGVQPEDEAEYYCALWYSNRWVFGGGTKLTVL

SEQ ID NO: 198 - DNA, 1500 bp, Artificial Sequence
  MCSP-G4 VH-VL-P x H2C VH-VL-P
caggtgcagctggtccagtctggggctgaggtgaagaggcctggggcctcaatgaaggtctcctgcaaggcttctgggtacaccttcaccaactactatatacactgggtgcgacaggcccctggacaaggtcttgagtggatgggttggatcaaccctaacagtggtgccacaaactatgcacagaagttccagggcagagtcaccatgaccagggacacgtccacgagcacagtctacatggagctgagcagcctgagatctgaggacacggccgtgtattactgtgcgaaatcctgggtctcctggtttgcttcctggggtcaaggaaccttggtcaccgtctcctcaggtggtggtggttctggcggcggcggctccggtggtggtggttctgagctcgtgatgacccagtctccagactccctggctgtgtctctgggcgagagggccaccatcaactgcaagtccagccagagtgttttaaacagctccaacaataggaactacttagcttggtaccagcagaaaccaggacagcctcctaagctgctcatttactgggcatctacccgggaatccggggtccctgaccgattcagtggcagcgggtctgggacagatttcactctcaccatcagtggcctgcaggctgaagatgtggcagtttattactgtcagcaacattatagtactccattcacttttggccctgggaccaaagtggatatcaaatccggaggtggtggatccgaggtgcagctgctcgagtctggaggaggattggtgcagcctggagggtcattgaaactctcatgtgcagcctctggattcaccttcaataagtacgccatgaactgggtccgccaggctccaggaaagggtttggaatgggttgctcgcataagaagtaaatataataattatgcaacatattatgccgattcagtgaaagacaggttcaccatctccagagatgattcaaaaaacactgcctatctacaaatgaacaacttgaaaactgaggacactgccgtgtactactgtgtgagacatgggaacttcggtaatagctacatatcctactgggcttactggggccaagggactctggtcaccgtctcctcaggtggtggtggttctggcggcggcggctccggtggtggtggttctgagctcgttgtgactcaggaaccttcactcaccgtatcacctggtggaacagtcacactcacttgtggctcctcgactggggctgttacatctggctactacccaaactgggtccaacaaaaaccaggtcaggcaccccgtggtctaataggtgggactaagttcctcgcccccggtactcctgccagattctcaggctccctgcttggaggcaaggctgccctcaccctctcaggggtacagccagaggatgaggcagaatattactgtgctctatggtacagcaaccgctgggtgttcggtggaggaaccaaactgactgtccta

SEQ ID NO: 199 - protein, 500 aa, Artificial Sequence
  MCSP-G4 VH-VL-P x H1E VH-VL-P
QVQLVQSGAEVKRPGASMKVSCKASGYTFTNYYIHWVRQAPGQGLEWMGWINPNSGATNYAQKFQGRVTMTRDTSTSTVYMELSSLRSEDTAVYYCAKSWVSWFASWGQGTLVTVSSGGGGSGGGGSGGGGSELVMTQSPDSLAVSLGERATINCKSSQSVLNSSNNRNYLAWYQQKPGQPPKLLIYWASTRESGVPDRFSGSGSGTDFTLTISGLQAEDVAVYYCQQHYSTPFTFGPGTKVDIKSGGGGSEVQLLESGGGLEQPGGSLKLSCAASGFTFNSYAMNWVRQAPGKGLEWVARIRSKYNNYATYYADSVKGRFTISRDDSKNTAYLQMNNLKTEDTAVYYCVRHGNFGNSYLSFWAYWGQGTLVTVSSGGGGSGGGGSGGGGSELVVTQEPSLTVSPGGTVTLTCGSSTGAVTSGYYPNWVQQKPGQAPRGLIGGTKFLAPGTPARFSGSLLGGKAALTLSGVQPEDEAEYYCALWYSNRWVFGGGTKLTVL

SEQ ID NO: 200 - DNA, 1500 bp, Artificial Sequence
  MCSP-G4 VH-VL-P x H1E VH-VL-P
caggtgcagctggtccagtctggggctgaggtgaagaggcctggggcctcaatgaaggtctcctgcaaggcttctgggtacaccttcaccaactactatatacactgggtgcgacaggcccctggacaaggtcttgagtggatgggttggatcaaccctaacagtggtgccacaaactatgcacagaagttccagggcagagtcaccatgaccagggacacgtccacgagcacagtctacatggagctgagcagcctgagatctgaggacacggccgtgtattactgtgcgaaatcctgggtctcctggtttgcttcctggggtcaaggaaccttggtcaccgtctcctcaggtggtggtggttctggcggcggcggctccggtggtggtggttctgagctcgtgatgacccagtctccagactccctggctgtgtctctgggcgagagggccaccatcaactgcaagtccagccagagtgttttaaacagctccaacaataggaactacttagcttggtaccagcagaaaccaggacagcctcctaagctgctcatttactgggcatctacccgggaatccggggtccctgaccgattcagtggcagcgggtctgggacagatttcactctcaccatcagtggcctgcaggctgaagatgtggcagtttattactgtcagcaacattatagtactccattcacttttggccctgggaccaaagtggatatcaaatccggaggtggtggatccgaggtgcagctgctcgagtctggaggaggattggagcagcctggagggtcattgaaactctcatgtgcagcctctggattcaccttcaattcgtacgccatgaactgggtccgccaggctccaggaaagggtttggaatgggttgctcgcataagaagtaaatataataattatgcaacatattatgccgattcagtgaaagggaggttcaccatctccagagatgattcaaaaaacactgcctatctacaaatgaacaacttgaaaactgaggacactgccgtgtactactgtgtgagacatgggaacttcggtaatagctacctatccttctgggcttactggggccaagggactctggtcaccgtctcctcaggtggtggtggttctggcggcggcggctccggtggtggtggttctgagctcgttgtgactcaggaaccttcactcaccgtatcacctggtggaacagtcacactcacttgtggctcctcgactggggctgttacatctggctactacccaaactgggtccaacaaaaaccaggtcaggcaccccgtggtctaataggtgggactaagttcctcgcccccggtactcctgccagattctcaggctccctgcttggaggcaaggctgccctcaccctctcaggggtacagccagaggatgaggcagaatattactgtgctctatggtacagcaaccgctgggtgttcggtggaggaaccaaactgactgtccta

SEQ ID NO: 201 - protein, 500 aa, Artificial Sequence
  MCSP-G4 VH-VL-P x G4H VH-VL-P
QVQLVQSGAEVKRPGASMKVSCKASGYTFTNYYIHWVRQAPGQGLEWMGWINPNSGATNYAQKFQGRVTMTRDTSTSTVYMELSSLRSEDTAVYYCAKSWVSWFASWGQGTLVTVSSGGGGSGGGGSGGGGSELVMTQSPDSLAVSLGERATINCKSSQSVLNSSNNRNYLAWYQQKPGQPPKLLIYWASTRESGVPDRFSGSGSGTDFTLTISGLQAEDVAVYYCQQHYSTPFTFGPGTKVDIKSGGGGSEVQLLESGGGLVQPGGSLKLSCAASGFTFNRYAMNWVRQAPGKGLEWVARIRSKYNNYATYYADSVKGRFTISRDDSKNTAYLQMNNLKTEDTAVYYCVRHGNFGNSYLSYFAYWGQGTLVTVSSGGGGSGGGGSGGGGSELVVTQEPSLTVSPGGTVTLTCGSSTGAVTSGYYPNWVQQKPGQAPRGLIGGTKFLAPGTPARFSGSLLGGKAALTLSGVQPEDEAEYYCALWYSNRWVFGGGTKLTVL

SEQ ID NO: 202 - DNA, 1500 bp, Artificial Sequence
  MCSP-G4 VH-VL-P x G4H VH-VL-P
caggtgcagctggtccagtctggggctgaggtgaagaggcctggggcctcaatgaaggtctcctgcaaggcttctgggtacaccttcaccaactactatatacactgggtgcgacaggcccctggacaaggtcttgagtggatgggttggatcaaccctaacagtggtgccacaaactatgcacagaagttccagggcagagtcaccatgaccagggacacgtccacgagcacagtctacatggagctgagcagcctgagatctgaggacacggccgtgtattactgtgcgaaatcctgggtctcctggtttgcttcctggggtcaaggaaccttggtcaccgtctcctcaggtggtggtggttctggcggcggcggctccggtggtggtggttctgagctcgtgatgacccagtctccagactccctggctgtgtctctgggcgagagggccaccatcaactgcaagtccagccagagtgttttaaacagctccaacaataggaactacttagcttggtaccagcagaaaccaggacagcctcctaagctgctcatttactgggcatctacccgggaatccggggtccctgaccgattcagtggcagcgggtctgggacagatttcactctcaccatcagtggcctgcaggctgaagatgtggcagtttattactgtcagcaacattatagtactccattcacttttggccctgggaccaaagtggatatcaaatccggaggtggtggatccgaggtgcagctgctcgagtctggaggaggattggtgcagcctggagggtcattgaaactctcatgtgcagcctctggattcaccttcaatcgctacgccatgaactgggtccgccaggctccaggaaagggtttggaatgggttgctcgcataagaagtaaatataataattatgcaacatattatgccgattcagtgaaagggaggttcaccatctccagagatgattcaaaaaacactgcctatctacaaatgaacaacttgaaaactgaggacactgccgtgtactactgtgtgagacatgggaacttcggtaatagctacttatcctacttcgcttactggggccaagggactctggtcaccgtctcctcaggtggtggtggttctggcggcggcggctccggtggtggtggttctgagctcgttgtgactcaggaaccttcactcaccgtatcacctggtggaacagtcacactcacttgtggctcctcgactggggctgttacatctggctactacccaaactgggtccaacaaaaaccaggtcaggcaccccgtggtctaataggtgggactaagttcctcgcccccggtactcctgccagattctcaggctccctgcttggaggcaaggctgccctcaccctctcaggggtacagccagaggatgaggcagaatattactgtgctctatggtacagcaaccgctgggtgttcggtggaggaaccaaactgactgtccta

SEQ ID NO: 203 - protein, 500 aa, Artificial Sequence
  MCSP-G4 VH-VL-P x A2J VH-VL-P
QVQLVQSGAEVKRPGASMKVSCKASGYTFTNYYIHWVRQAPGQGLEWMGWINPNSGATNYAQKFQGRVTMTRDTSTSTVYMELSSLRSEDTAVYYCAKSWVSWFASWGQGTLVTVSSGGGGSGGGGSGGGGSELVMTQSPDSLAVSLGERATINCKSSQSVLNSSNNRNYLAWYQQKPGQPPKLLIYWASTRESGVPDRFSGSGSGTDFTLTISGLQAEDVAVYYCQQHYSTPFTFGPGTKVDIKSGGGGSEVQLLESGGGLVQPGGSLKLSCAASGFTFNVYAMNWVRQAPGKGLEWVARIRSKYNNYATYYADSVKKRFTISRDDSKNTAYLQMNNLKTEDTAVYYCVRHGNFGNSYLSWWAYWGQGTLVTVSSGGGGSGGGGSGGGGSELVVTQEPSLTVSPGGTVTLTCRSSTGAVTSGYYPNWVQQKPGQAPRGLIGATDMRPSGTPARFSGSLLGGKAALTLSGVQPEDEAEYYCALWYSNRWVFGGGTKLTVL

SEQ ID NO: 204 - DNA, 1500 bp, Artificial Sequence
  MCSP-G4 VH-VL-P x A2J VH-VL-P
caggtgcagctggtccagtctggggctgaggtgaagaggcctggggcctcaatgaaggtctcctgcaaggcttctgggtacaccttcaccaactactatatacactgggtgcgacaggcccctggacaaggtcttgagtggatgggttggatcaaccctaacagtggtgccacaaactatgcacagaagttccagggcagagtcaccatgaccagggacacgtccacgagcacagtctacatggagctgagcagcctgagatctgaggacacggccgtgtattactgtgcgaaatcctgggtctcctggtttgcttcctggggtcaaggaaccttggtcaccgtctcctcaggtggtggtggttctggcggcggcggctccggtggtggtggttctgagctcgtgatgacccagtctccagactccctggctgtgtctctgggcgagagggccaccatcaactgcaagtccagccagagtgttttaaacagctccaacaataggaactacttagcttggtaccagcagaaaccaggacagcctcctaagctgctcatttactgggcatctacccgggaatccggggtccctgaccgattcagtggcagcgggtctgggacagatttcactctcaccatcagtggcctgcaggctgaagatgtggcagtttattactgtcagcaacattatagtactccattcacttttggccctgggaccaaagtggatatcaaatccggaggtggtggatccgaggtgcagctgctcgagtctggaggaggattggtgcagcctggagggtcattgaaactctcatgtgcagcctctggattcaccttcaatgtctacgccatgaactgggtccgccaggctccaggaaagggtttggaatgggttgctcgcataagaagtaaatataataattatgcaacatattatgccgattcagtgaaaaagaggttcaccatctccagagatgattcaaaaaacactgcctatctacaaatgaacaacttgaaaactgaggacactgccgtgtactactgtgtgagacatgggaacttcggtaatagctacttatcctggtgggcttactggggccaagggactctggtcaccgtctcctcaggtggtggtggttctggcggcggcggctccggtggtggtggttctgagctcgttgtgactcaggaaccttcactcaccgtatcacctggtggaacagtcacactcacttgtcgctcctcgactggggctgttacatctggctactacccaaactgggtccaacaaaaaccaggtcaggcaccccgtggtctaataggtgccactgacatgaggccctctggtactcctgccagattctcaggctccctgcttggaggcaaggctgccctcaccctctcaggggtacagccagaggatgaggcagaatattactgtgctctatggtacagcaaccgctgggtgttcggtggaggaaccaaactgactgtccta

SEQ ID NO: 205 - protein, 500 aa, Artificial Sequence
  MCSP-G4 VH-VL-P x E1L VH-VL-P
QVQLVQSGAEVKRPGASMKVSCKASGYTFTNYYIHWVRQAPGQGLEWMGWINPNSGATNYAQKFQGRVTMTRDTSTSTVYMELSSLRSEDTAVYYCAKSWVSWFASWGQGTLVTVSSGGGGSGGGGSGGGGSELVMTQSPDSLAVSLGERATINCKSSQSVLNSSNNRNYLAWYQQKPGQPPKLLIYWASTRESGVPDRFSGSGSGTDFTLTISGLQAEDVAVYYCQQHYSTPFTFGPGTKVDIKSGGGGSEVQLLESGGGLVQPGGSLKLSCAASGFTFNKYAMNWVRQAPGKGLEWVARIRSKYNNYATYYADSVKSRFTISRDDSKNTAYLQMNNLKTEDTAVYYCVRHGNFGNSYTSYYAYWGQGTLVTVSSGGGGSGGGGSGGGGSELVVTQEPSLTVSPGGTVTLTCGSSTGAVTSGYYPNWVQQKPGQAPRGLIGGTKFLAPGTPARFSGSLLGGKAALTLSGVQPEDEAEYYCALWYSNRWVFGGGTKLTVL

SEQ ID NO: 206 - DNA, 1500 bp, Artificial Sequence
  MCSP-G4 VH-VL-P x E1L VH-VL-P
caggtgcagctggtccagtctggggctgaggtgaagaggcctggggcctcaatgaaggtctcctgcaaggcttctgggtacaccttcaccaactactatatacactgggtgcgacaggcccctggacaaggtcttgagtggatgggttggatcaaccctaacagtggtgccacaaactatgcacagaagttccagggcagagtcaccatgaccagggacacgtccacgagcacagtctacatggagctgagcagcctgagatctgaggacacggccgtgtattactgtgcgaaatcctgggtctcctggtttgcttcctggggtcaaggaaccttggtcaccgtctcctcaggtggtggtggttctggcggcggcggctccggtggtggtggttctgagctcgtgatgacccagtctccagactccctggctgtgtctctgggcgagagggccaccatcaactgcaagtccagccagagtgttttaaacagctccaacaataggaactacttagcttggtaccagcagaaaccaggacagcctcctaagctgctcatttactgggcatctacccgggaatccggggtccctgaccgattcagtggcagcgggtctgggacagatttcactctcaccatcagtggcctgcaggctgaagatgtggcagtttattactgtcagcaacattatagtactccattcacttttggccctgggaccaaagtggatatcaaatccggaggtggtggatccgaggtgcagctgctcgagtctggaggaggattggtgcagcctggagggtcattgaaactctcatgtgcagcctctggattcaccttcaataagtacgccatgaactgggtccgccaggctccaggaaagggtttggaatgggttgctcgcataagaagtaaatataataattatgcaacatattatgccgattcagtgaaatcgaggttcaccatctccagagatgattcaaaaaacactgcctatctacaaatgaacaacttgaaaactgaggacactgccgtgtactactgtgtgagacatgggaacttcggtaatagctacacatcctactacgcttactggggccaagggactctggtcaccgtctcctcaggtggtggtggttctggcggcggcggctccggtggtggtggttctgagctcgttgtgactcaggaaccttcactcaccgtatcacctggtggaacagtcacactcacttgtggctcctcgactggggctgttacatctggctactacccaaactgggtccaacaaaaaccaggtcaggcaccccgtggtctaataggtgggactaagttcctcgcccccggtactcctgccagattctcaggctccctgcttggaggcaaggctgccctcaccctctcaggggtacagccagaggatgaggcagaatattactgtgctctatggtacagcaaccgctgggtgttcggtggaggaaccaaactgactgtccta

SEQ ID NO: 207 - protein, 500 aa, Artificial Sequence
  MCSP-G4 VH-VL-P x E2M VH-VL-P
QVQLVQSGAEVKRPGASMKVSCKASGYTFTNYYIHWVRQAPGQGLEWMGWINPNSGATNYAQKFQGRVTMTRDTSTSTVYMELSSLRSEDTAVYYCAKSWVSWFASWGQGTLVTVSSGGGGSGGGGSGGGGSELVMTQSPDSLAVSLGERATINCKSSQSVLNSSNNRNYLAWYQQKPGQPPKLLIYWASTRESGVPDRFSGSGSGTDFTLTISGLQAEDVAVYYCQQHYSTPFTFGPGTKVDIKSGGGGSEVQLLESGGGLVQPGGSLKLSCAASGFTFNGYAMNWVRQAPGKGLEWVARIRSKYNNYATYYADSVKERFTISRDDSKNTAYLQMNNLKTEDTAVYYCVRHRNFGNSYLSWFAYWGQGTLVTVSSGGGGSGGGGSGGGGSELVVTQEPSLTVSPGGTVTLTCRSSTGAVTSGYYPNWVQQKPGQAPRGLIGATDMRPSGTPARFSGSLLGGKAALTLSGVQPEDEAEYYCALWYSNRWVFGGGTKLTVL

SEQ ID NO: 208 - DNA, 1500 bp, Artificial Sequence
  MCSP-G4 VH-VL-P x E2M VH-VL-P
caggtgcagctggtccagtctggggctgaggtgaagaggcctggggcctcaatgaaggtctcctgcaaggcttctgggtacaccttcaccaactactatatacactgggtgcgacaggcccctggacaaggtcttgagtggatgggttggatcaaccctaacagtggtgccacaaactatgcacagaagttccagggcagagtcaccatgaccagggacacgtccacgagcacagtctacatggagctgagcagcctgagatctgaggacacggccgtgtattactgtgcgaaatcctgggtctcctggtttgcttcctggggtcaaggaaccttggtcaccgtctcctcaggtggtggtggttctggcggcggcggctccggtggtggtggttctgagctcgtgatgacccagtctccagactccctggctgtgtctctgggcgagagggccaccatcaactgcaagtccagccagagtgttttaaacagctccaacaataggaactacttagcttggtaccagcagaaaccaggacagcctcctaagctgctcatttactgggcatctacccgggaatccggggtccctgaccgattcagtggcagcgggtctgggacagatttcactctcaccatcagtggcctgcaggctgaagatgtggcagtttattactgtcagcaacattatagtactccattcacttttggccctgggaccaaagtggatatcaaatccggaggtggtggatccgaggtgcagctgctcgagtctggaggaggattggtgcagcctggagggtcattgaaactctcatgtgcagcctctggattcaccttcaatggctacgccatgaactgggtccgccaggctccaggaaagggtttggaatgggttgctcgcataagaagtaaatataataattatgcaacatattatgccgattcagtgaaagagaggttcaccatctccagagatgattcaaaaaacactgcctatctacaaatgaacaacttgaaaactgaggacactgccgtgtactactgtgtgagacataggaacttcggtaatagctacttatcctggttcgcttactggggccaagggactctggtcaccgtctcctcaggtggtggtggttctggcggcggcggctccggtggtggtggttctgagctcgttgtgactcaggaaccttcactcaccgtatcacctggtggaacagtcacactcacttgtcgctcctcgactggggctgttacatctggctactacccaaactgggtccaacaaaaaccaggtcaggcaccccgtggtctaataggtgccactgacatgaggccctctggtactcctgccagattctcaggctccctgcttggaggcaaggctgccctcaccctctcaggggtacagccagaggatgaggcagaatattactgtgctctatggtacagcaaccgctgggtgttcggtggaggaaccaaactgactgtccta

SEQ ID NO: 209 - protein, 500 aa, Artificial Sequence
  MCSP-G4 VH-VL-P x F7O VH-VL-P
QVQLVQSGAEVKRPGASMKVSCKASGYTFTNYYIHWVRQAPGQGLEWMGWINPNSGATNYAQKFQGRVTMTRDTSTSTVYMELSSLRSEDTAVYYCAKSWVSWFASWGQGTLVTVSSGGGGSGGGGSGGGGSELVMTQSPDSLAVSLGERATINCKSSQSVLNSSNNRNYLAWYQQKPGQPPKLLIYWASTRESGVPDRFSGSGSGTDFTLTISGLQAEDVAVYYCQQHYSTPFTFGPGTKVDIKSGGGGSEVQLLESGGGLVQPGGSLKLSCAASGFTFNVYAMNWVRQAPGKGLEWVARIRSKYNNYATYYADSVKKRFTISRDDSKNTAYLQMNNLKTEDTAVYYCVRHGNFGNSYISWWAYWGQGTLVTVSSGGGGSGGGGSGGGGSELVVTQEPSLTVSPGGTVTLTCGSSTGAVTSGYYPNWVQQKPGQAPRGLIGGTKFLAPGTPARFSGSLLGGKAALTLSGVQPEDEAEYYCALWYSNRWVFGGGTKLTVL

SEQ ID NO: 210 - DNA, 1500 bp, Artificial Sequence
  MCSP-G4 VH-VL-P x F7O VH-VL-P
caggtgcagctggtccagtctggggctgaggtgaagaggcctggggcctcaatgaaggtctcctgcaaggcttctgggtacaccttcaccaactactatatacactgggtgcgacaggcccctggacaaggtcttgagtggatgggttggatcaaccctaacagtggtgccacaaactatgcacagaagttccagggcagagtcaccatgaccagggacacgtccacgagcacagtctacatggagctgagcagcctgagatctgaggacacggccgtgtattactgtgcgaaatcctgggtctcctggtttgcttcctggggtcaaggaaccttggtcaccgtctcctcaggtggtggtggttctggcggcggcggctccggtggtggtggttctgagctcgtgatgacccagtctccagactccctggctgtgtctctgggcgagagggccaccatcaactgcaagtccagccagagtgttttaaacagctccaacaataggaactacttagcttggtaccagcagaaaccaggacagcctcctaagctgctcatttactgggcatctacccgggaatccggggtccctgaccgattcagtggcagcgggtctgggacagatttcactctcaccatcagtggcctgcaggctgaagatgtggcagtttattactgtcagcaacattatagtactccattcacttttggccctgggaccaaagtggatatcaaatccggaggtggtggatccgaggtgcagctgctcgagtctggaggaggattggtgcagcctggagggtcattgaaactctcatgtgcagcctctggattcaccttcaatgtgtacgccatgaactgggtccgccaggctccaggaaagggtttggaatgggttgctcgcataagaagtaaatataataattatgcaacatattatgccgattcagtgaaaaagaggttcaccatctccagagatgattcaaaaaacactgcctatctacaaatgaacaacttgaaaactgaggacactgccgtgtactactgtgtgagacatgggaacttcggtaatagctacatatcctggtgggcttactggggccaagggactctggtcaccgtctcctcaggtggtggtggttctggcggcggcggctccggtggtggtggttctgagctcgttgtgactcaggaaccttcactcaccgtatcacctggtggaacagtcacactcacttgtggctcctcgactggggctgttacatctggctactacccaaactgggtccaacaaaaaccaggtcaggcaccccgtggtctaataggtgggactaagttcctcgcccccggtactcctgccagattctcaggctccctgcttggaggcaaggctgccctcaccctctcaggggtacagccagaggatgaggcagaatattactgtgctctatggtacagcaaccgctgggtgttcggtggaggaaccaaactgactgtccta

SEQ ID NO: 211 - protein, 500 aa, Artificial Sequence
  MCSP-G4 VH-VL-P x F12Q VH-VL
QVQLVQSGAEVKRPGASMKVSCKASGYTFTNYYIHWVRQAPGQGLEWMGWINPNSGATNYAQKFQGRVTMTRDTSTSTVYMELSSLRSEDTAVYYCAKSWVSWFASWGQGTLVTVSSGGGGSGGGGSGGGGSELVMTQSPDSLAVSLGERATINCKSSQSVLNSSNNRNYLAWYQQKPGQPPKLLIYWASTRESGVPDRFSGSGSGTDFTLTISGLQAEDVAVYYCQQHYSTPFTFGPGTKVDIKSGGGGSEVQLVESGGGLVQPGGSLKLSCAASGFTFNSYAMNWVRQAPGKGLEWVARIRSKYNNYATYYADSVKGRFTISRDDSKNTAYLQMNNLKTEDTAVYYCVRHGNFGNSYVSWWAYWGQGTLVTVSSGGGGSGGGGSGGGGSQTVVTQEPSLTVSPGGTVTLTCGSSTGAVTSGNYPNWVQQKPGQAPRGLIGGTKFLAPGTPARFSGSLLGGKAALTLSGVQPEDEAEYYCVLWYSNRWVFGGGTKLTVL

SEQ ID NO: 212 - DNA, 1500 bp, Artificial Sequence
  MCSP-G4 VH-VL-P x F12Q VH-VL
caggtgcagctggtccagtctggggctgaggtgaagaggcctggggcctcaatgaaggtctcctgcaaggcttctgggtacaccttcaccaactactatatacactgggtgcgacaggcccctggacaaggtcttgagtggatgggttggatcaaccctaacagtggtgccacaaactatgcacagaagttccagggcagagtcaccatgaccagggacacgtccacgagcacagtctacatggagctgagcagcctgagatctgaggacacggccgtgtattactgtgcgaaatcctgggtctcctggtttgcttcctggggtcaaggaaccttggtcaccgtctcctcaggtggtggtggttctggcggcggcggctccggtggtggtggttctgagctcgtgatgacccagtctccagactccctggctgtgtctctgggcgagagggccaccatcaactgcaagtccagccagagtgttttaaacagctccaacaataggaactacttagcttggtaccagcagaaaccaggacagcctcctaagctgctcatttactgggcatctacccgggaatccggggtccctgaccgattcagtggcagcgggtctgggacagatttcactctcaccatcagtggcctgcaggctgaagatgtggcagtttattactgtcagcaacattatagtactccattcacttttggccctgggaccaaagtggatatcaaatccggaggtggtggatccgaggtgcagctggtcgagtctggaggaggattggtgcagcctggagggtcattgaaactctcatgtgcagcctctggattcaccttcaatagctacgccatgaactgggtccgccaggctccaggaaagggtttggaatgggttgctcgcataagaagtaaatataataattatgcaacatattatgccgattcagtgaaaggcaggttcaccatctccagagatgattcaaaaaacactgcctatctacaaatgaacaacttgaaaactgaggacactgccgtgtactactgtgtgagacatgggaacttcggtaatagctacgtttcctggtgggcttactggggccaagggactctggtcaccgtctcctcaggtggtggtggttctggcggcggcggctccggtggtggtggttctcagactgttgtgactcaggaaccttcactcaccgtatcacctggtggaacagtcacactcacttgtggctcctcgactggggctgttacatctggcaactacccaaactgggtccaacaaaaaccaggtcaggcaccccgtggtctaataggtgggactaagttcctcgcccccggtactcctgccagattctcaggctccctgcttggaggcaaggctgccctcaccctctcaggggtacagccagaggatgaggcagaatattactgtgttctatggtacagcaaccgctgggtgttcggtggaggaaccaaactgactgtccta

SEQ ID NO: 213 - protein, 500 aa, Artificial Sequence
  MCSP-G4 VH-VL-P x I2C VH-VL
QVQLVQSGAEVKRPGASMKVSCKASGYTFTNYYIHWVRQAPGQGLEWMGWINPNSGATNYAQKFQGRVTMTRDTSTSTVYMELSSLRSEDTAVYYCAKSWVSWFASWGQGTLVTVSSGGGGSGGGGSGGGGSELVMTQSPDSLAVSLGERATINCKSSQSVLNSSNNRNYLAWYQQKPGQPPKLLIYWASTRESGVPDRFSGSGSGTDFTLTISGLQAEDVAVYYCQQHYSTPFTFGPGTKVDIKSGGGGSEVQLVESGGGLVQPGGSLKLSCAASGFTFNKYAMNWVRQAPGKGLEWVARIRSKYNNYATYYADSVKDRFTISRDDSKNTAYLQMNNLKTEDTAVYYCVRHGNFGNSYISYWAYWGQGTLVTVSSGGGGSGGGGSGGGGSQTVVTQEPSLTVSPGGTVTLTCGSSTGAVTSGNYPNWVQQKPGQAPRGLIGGTKFLAPGTPARFSGSLLGGKAALTLSGVQPEDEAEYYCVLWYSNRWVFGGGTKLTVL

SEQ ID NO: 214 - DNA, 1500 bp, Artificial Sequence
  MCSP-G4 VH-VL-P x I2C VH-VL
caggtgcagctggtccagtctggggctgaggtgaagaggcctggggcctcaatgaaggtctcctgcaaggcttctgggtacaccttcaccaactactatatacactgggtgcgacaggcccctggacaaggtcttgagtggatgggttggatcaaccctaacagtggtgccacaaactatgcacagaagttccagggcagagtcaccatgaccagggacacgtccacgagcacagtctacatggagctgagcagcctgagatctgaggacacggccgtgtattactgtgcgaaatcctgggtctcctggtttgcttcctggggtcaaggaaccttggtcaccgtctcctcaggtggtggtggttctggcggcggcggctccggtggtggtggttctgagctcgtgatgacccagtctccagactccctggctgtgtctctgggcgagagggccaccatcaactgcaagtccagccagagtgttttaaacagctccaacaataggaactacttagcttggtaccagcagaaaccaggacagcctcctaagctgctcatttactgggcatctacccgggaatccggggtccctgaccgattcagtggcagcgggtctgggacagatttcactctcaccatcagtggcctgcaggctgaagatgtggcagtttattactgtcagcaacattatagtactccattcacttttggccctgggaccaaagtggatatcaaatccggaggtggtggatccgaggtgcagctggtcgagtctggaggaggattggtgcagcctggagggtcattgaaactctcatgtgcagcctctggattcaccttcaataagtacgccatgaactgggtccgccaggctccaggaaagggtttggaatgggttgctcgcataagaagtaaatataataattatgcaacatattatgccgattcagtgaaagacaggttcaccatctccagagatgattcaaaaaacactgcctatctacaaatgaacaacttgaaaactgaggacactgccgtgtactactgtgtgagacatgggaacttcggtaatagctacatatcctactgggcttactggggccaagggactctggtcaccgtctcctcaggtggtggtggttctggcggcggcggctccggtggtggtggttctcagactgttgtgactcaggaaccttcactcaccgtatcacctggtggaacagtcacactcacttgtggctcctcgactggggctgttacatctggcaactacccaaactgggtccaacaaaaaccaggtcaggcaccccgtggtctaataggtgggactaagttcctcgcccccggtactcctgccagattctcaggctccctgcttggaggcaaggctgccctcaccctctcaggggtacagccagaggatgaggcagaatattactgtgttctatggtacagcaaccgctgggtgttcggtggaggaaccaaactgactgtccta

SEQ ID NO: 215 - protein, 500 aa, Artificial Sequence
  MCSP-D2 VH-VL x H2C VH-VL
QVQLVQSGAEVKKPGASVKVSCKASGYTFTGYYMHWVRQAPGQGLEWMGWINPNSGGTSYAQKFQGRVTMTRDTSTSTVYMELSNLRSDDTAVYYCAKSWVSWFASWGQGTLVTVSSGGGGSGGGGSGGGGSDIVMTQSPDSLAVSLGERATINCKSSQSVLNSSNNRNYLAWYQQKPGQPPKLLIYWASTRESGVPDRFSGSGSGTDFTLTISGLQAEDVAVYYCQQHYSTPFTFGPGTKVDIKSGGGGSEVQLVESGGGLVQPGGSLKLSCAASGFTFNKYAMNWVRQAPGKGLEWVARIRSKYNNYATYYADSVKDRFTISRDDSKNTAYLQMNNLKTEDTAVYYCVRHGNFGNSYISYWAYWGQGTLVTVSSGGGGSGGGGSGGGGSQTVVTQEPSLTVSPGGTVTLTCGSSTGAVTSGYYPNWVQQKPGQAPRGLIGGTKFLAPGTPARFSGSLLGGKAALTLSGVQPEDEAEYYCALWYSNRWVFGGGTKLTVL

SEQ ID NO: 216 - DNA, 1500 bp, Artificial Sequence
  MCSP-D2 VH-VL x H2C VH-VL
caggtgcagctggtccagtctggggctgaggtgaagaagcctggggcctcagtgaaggtctcctgcaaggcttctggatacaccttcaccggctactatatgcactgggtgcgacaggcccctggacaagggcttgagtggatgggatggatcaaccctaacagtggtggcacaagctacgcacagaagttccagggcagagtcaccatgactagggacacgtccacgagcacagtctacatggagctgagcaacctgagatctgacgacacggccgtgtattactgtgcgaaatcctgggtctcctggtttgcttcctggggtcaaggaaccttggtcaccgtctcctcaggtggtggtggttctggcggcggcggctccggtggtggtggttctgatatcgtgatgacccagtctccagactccctggctgtgtctctgggcgagagggccaccatcaactgcaagtccagccagagtgttttaaacagctccaacaataggaactacttagcttggtaccagcagaaaccaggacagcctcctaagctgctcatttactgggcatctacccgggaatccggggtccctgaccgattcagtggcagcgggtctgggacagatttcactctcaccatcagtggcctgcaggctgaagatgtggcagtttattactgtcagcaacattatagtactccattcacttttggccctgggaccaaagtggatatcaaatccggaggtggtggatccgaggtgcagctggtcgagtctggaggaggattggtgcagcctggagggtcattgaaactctcatgtgcagcctctggattcaccttcaataagtacgccatgaactgggtccgccaggctccaggaaagggtttggaatgggttgctcgcataagaagtaaatataataattatgcaacatattatgccgattcagtgaaagacaggttcaccatctccagagatgattcaaaaaacactgcctatctacaaatgaacaacttgaaaactgaggacactgccgtgtactactgtgtgagacatgggaacttcggtaatagctacatatcctactgggcttactggggccaagggactctggtcaccgtctcctcaggtggtggtggttctggcggcggcggctccggtggtggtggttctcagactgttgtgactcaggaaccttcactcaccgtatcacctggtggaacagtcacactcacttgtggctcctcgactggggctgttacatctggctactacccaaactgggtccaacaaaaaccaggtcaggcaccccgtggtctaataggtgggactaagttcctcgcccccggtactcctgccagattctcaggctccctgcttggaggcaaggctgccctcaccctctcaggggtacagccagaggatgaggcagaatattactgtgctctatggtacagcaaccgctgggtgttcggtggaggaaccaaactgactgtccta

SEQ ID NO: 217 - protein, 500 aa, Artificial Sequence
  MCSP-D2 VH-VL x F12Q VH-VL
QVQLVQSGAEVKKPGASVKVSCKASGYTFTGYYMHWVRQAPGQGLEWMGWINPNSGGTSYAQKFQGRVTMTRDTSTSTVYMELSNLRSDDTAVYYCAKSWVSWFASWGQGTLVTVSSGGGGSGGGGSGGGGSDIVMTQSPDSLAVSLGERATINCKSSQSVLNSSNNRNYLAWYQQKPGQPPKLLIYWASTRESGVPDRFSGSGSGTDFTLTISGLQAEDVAVYYCQQHYSTPFTFGPGTKVDIKSGGGGSEVQLVESGGGLVQPGGSLKLSCAASGFTFNSYAMNWVRQAPGKGLEWVARIRSKYNNYATYYADSVKGRFTISRDDSKNTAYLQMNNLKTEDTAVYYCVRHGNFGNSYVSWWAYWGQGTLVTVSSGGGGSGGGGSGGGGSQTVVTQEPSLTVSPGGTVTLTCGSSTGAVTSGNYPNWVQQKPGQAPRGLIGGTKFLAPGTPARFSGSLLGGKAALTLSGVQPEDEAEYYCVLWYSNRWVFGGGTKLTVL

SEQ ID NO: 218 - DNA, 1500 bp, Artificial Sequence
  MCSP-D2 VH-VL x F12Q VH-VL
caggtgcagctggtccagtctggggctgaggtgaagaagcctggggcctcagtgaaggtctcctgcaaggcttctggatacaccttcaccggctactatatgcactgggtgcgacaggcccctggacaagggcttgagtggatgggatggatcaaccctaacagtggtggcacaagctacgcacagaagttccagggcagagtcaccatgactagggacacgtccacgagcacagtctacatggagctgagcaacctgagatctgacgacacggccgtgtattactgtgcgaaatcctgggtctcctggtttgcttcctggggtcaaggaaccttggtcaccgtctcctcaggtggtggtggttctggcggcggcggctccggtggtggtggttctgatatcgtgatgacccagtctccagactccctggctgtgtctctgggcgagagggccaccatcaactgcaagtccagccagagtgttttaaacagctccaacaataggaactacttagcttggtaccagcagaaaccaggacagcctcctaagctgctcatttactgggcatctacccgggaatccggggtccctgaccgattcagtggcagcgggtctgggacagatttcactctcaccatcagtggcctgcaggctgaagatgtggcagtttattactgtcagcaacattatagtactccattcacttttggccctgggaccaaagtggatatcaaatccggaggtggtggatccgaggtgcagctggtcgagtctggaggaggattggtgcagcctggagggtcattgaaactctcatgtgcagcctctggattcaccttcaatagctacgccatgaactgggtccgccaggctccaggaaagggtttggaatgggttgctcgcataagaagtaaatataataattatgcaacatattatgccgattcagtgaaaggcaggttcaccatctccagagatgattcaaaaaacactgcctatctacaaatgaacaacttgaaaactgaggacactgccgtgtactactgtgtgagacatgggaacttcggtaatagctacgtttcctggtgggcttactggggccaagggactctggtcaccgtctcctcaggtggtggtggttctggcggcggcggctccggtggtggtggttctcagactgttgtgactcaggaaccttcactcaccgtatcacctggtggaacagtcacactcacttgtggctcctcgactggggctgttacatctggcaactacccaaactgggtccaacaaaaaccaggtcaggcaccccgtggtctaataggtgggactaagttcctcgcccccggtactcctgccagattctcaggctccctgcttggaggcaaggctgccctcaccctctcaggggtacagccagaggatgaggcagaatattactgtgttctatggtacagcaaccgctgggtgttcggtggaggaaccaaactgactgtccta

SEQ ID NO: 219 - protein, 500 aa, Artificial Sequence
  MCSP-D2 VH-VL x I2C VH-VL
QVQLVQSGAEVKKPGASVKVSCKASGYTFTGYYMHWVRQAPGQGLEWMGWINPNSGGTSYAQKFQGRVTMTRDTSTSTVYMELSNLRSDDTAVYYCAKSWVSWFASWGQGTLVTVSSGGGGSGGGGSGGGGSDIVMTQSPDSLAVSLGERATINCKSSQSVLNSSNNRNYLAWYQQKPGQPPKLLIYWASTRESGVPDRFSGSGSGTDFTLTISGLQAEDVAVYYCQQHYSTPFTFGPGTKVDIKSGGGGSEVQLVESGGGLVQPGGSLKLSCAASGFTFNKYAMNWVRQAPGKGLEWVARIRSKYNNYATYYADSVKDRFTISRDDSKNTAYLQMNNLKTEDTAVYYCVRHGNFGNSYISYWAYWGQGTLVTVSSGGGGSGGGGSGGGGSQTVVTQEPSLTVSPGGTVTLTCGSSTGAVTSGNYPNWVQQKPGQAPRGLIGGTKFLAPGTPARFSGSLLGGKAALTLSGVQPEDEAEYYCVLWYSNRWVFGGGTKLTVL

SEQ ID NO: 220 - DNA, 1500 bp, Artificial Sequence
  MCSP-D2 VH-VL x I2C VH-VL
caggtgcagctggtccagtctggggctgaggtgaagaagcctggggcctcagtgaaggtctcctgcaaggcttctggatacaccttcaccggctactatatgcactgggtgcgacaggcccctggacaagggcttgagtggatgggatggatcaaccctaacagtggtggcacaagctacgcacagaagttccagggcagagtcaccatgactagggacacgtccacgagcacagtctacatggagctgagcaacctgagatctgacgacacggccgtgtattactgtgcgaaatcctgggtctcctggtttgcttcctggggtcaaggaaccttggtcaccgtctcctcaggtggtggtggttctggcggcggcggctccggtggtggtggttctgatatcgtgatgacccagtctccagactccctggctgtgtctctgggcgagagggccaccatcaactgcaagtccagccagagtgttttaaacagctccaacaataggaactacttagcttggtaccagcagaaaccaggacagcctcctaagctgctcatttactgggcatctacccgggaatccggggtccctgaccgattcagtggcagcgggtctgggacagatttcactctcaccatcagtggcctgcaggctgaagatgtggcagtttattactgtcagcaacattatagtactccattcacttttggccctgggaccaaagtggatatcaaatccggaggtggtggatccgaggtgcagctggtcgagtctggaggaggattggtgcagcctggagggtcattgaaactctcatgtgcagcctctggattcaccttcaataagtacgccatgaactgggtccgccaggctccaggaaagggtttggaatgggttgctcgcataagaagtaaatataataattatgcaacatattatgccgattcagtgaaagacaggttcaccatctccagagatgattcaaaaaacactgcctatctacaaatgaacaacttgaaaactgaggacactgccgtgtactactgtgtgagacatgggaacttcggtaatagctacatatcctactgggcttactggggccaagggactctggtcaccgtctcctcaggtggtggtggttctggcggcggcggctccggtggtggtggttctcagactgttgtgactcaggaaccttcactcaccgtatcacctggtggaacagtcacactcacttgtggctcctcgactggggctgttacatctggcaactacccaaactgggtccaacaaaaaccaggtcaggcaccccgtggtctaataggtgggactaagttcctcgcccccggtactcctgccagattctcaggctccctgcttggaggcaaggctgccctcaccctctcaggggtacagccagaggatgaggcagaatattactgtgttctatggtacagcaaccgctgggtgttcggtggaggaaccaaactgactgtccta

SEQ ID NO: 221 - protein, 500 aa, Artificial Sequence
  MCSP-D2 VH-VL-P x H2C VH-VL-P
QVQLVQSGAEVKKPGASVKVSCKASGYTFTGYYMHWVRQAPGQGLEWMGWINPNSGGTSYAQKFQGRVTMTRDTSTSTVYMELSNLRSDDTAVYYCAKSWVSWFASWGQGTLVTVSSGGGGSGGGGSGGGGSELVMTQSPDSLAVSLGERATINCKSSQSVLNSSNNRNYLAWYQQKPGQPPKLLIYWASTRESGVPDRFSGSGSGTDFTLTISGLQAEDVAVYYCQQHYSTPFTFGPGTKVDIKSGGGGSEVQLLESGGGLVQPGGSLKLSCAASGFTFNKYAMNWVRQAPGKGLEWVARIRSKYNNYATYYADSVKDRFTISRDDSKNTAYLQMNNLKTEDTAVYYCVRHGNFGNSYISYWAYWGQGTLVTVSSGGGGSGGGGSGGGGSELVVTQEPSLTVSPGGTVTLTCGSSTGAVTSGYYPNWVQQKPGQAPRGLIGGTKFLAPGTPARFSGSLLGGKAALTLSGVQPEDEAEYYCALWYSNRWVFGGGTKLTVL

SEQ ID NO: 222 - DNA, 1500 bp, Artificial Sequence
  MCSP-D2 VH-VL-P x H2C VH-VL-P
caggtgcagctggtccagtctggggctgaggtgaagaagcctggggcctcagtgaaggtctcctgcaaggcttctggatacaccttcaccggctactatatgcactgggtgcgacaggcccctggacaagggcttgagtggatgggatggatcaaccctaacagtggtggcacaagctacgcacagaagttccagggcagagtcaccatgactagggacacgtccacgagcacagtctacatggagctgagcaacctgagatctgacgacacggccgtgtattactgtgcgaaatcctgggtctcctggtttgcttcctggggtcaaggaaccttggtcaccgtctcctcaggtggtggtggttctggcggcggcggctccggtggtggtggttctgagctcgtgatgacccagtctccagactccctggctgtgtctctgggcgagagggccaccatcaactgcaagtccagccagagtgttttaaacagctccaacaataggaactacttagcttggtaccagcagaaaccaggacagcctcctaagctgctcatttactgggcatctacccgggaatccggggtccctgaccgattcagtggcagcgggtctgggacagatttcactctcaccatcagtggcctgcaggctgaagatgtggcagtttattactgtcagcaacattatagtactccattcacttttggccctgggaccaaagtggatatcaaatccggaggtggtggatccgaggtgcagctgctcgagtctggaggaggattggtgcagcctggagggtcattgaaactctcatgtgcagcctctggattcaccttcaataagtacgccatgaactgggtccgccaggctccaggaaagggtttggaatgggttgctcgcataagaagtaaatataataattatgcaacatattatgccgattcagtgaaagacaggttcaccatctccagagatgattcaaaaaacactgcctatctacaaatgaacaacttgaaaactgaggacactgccgtgtactactgtgtgagacatgggaacttcggtaatagctacatatcctactgggcttactggggccaagggactctggtcaccgtctcctcaggtggtggtggttctggcggcggcggctccggtggtggtggttctgagctcgttgtgactcaggaaccttcactcaccgtatcacctggtggaacagtcacactcacttgtggctcctcgactggggctgttacatctggctactacccaaactgggtccaacaaaaaccaggtcaggcaccccgtggtctaataggtgggactaagttcctcgcccccggtactcctgccagattctcaggctccctgcttggaggcaaggctgccctcaccctctcaggggtacagccagaggatgaggcagaatattactgtgctctatggtacagcaaccgctgggtgttcggtggaggaaccaaactgactgtccta

SEQ ID NO: 223 - protein, 499 aa, Artificial Sequence
  MCSP-F9 VH-VL x H2C VH-VL
QVQLQESGPGLVKPSETLSLTCVVSGGSISSSNWWSWVRQPPGKGLEWLGTIYYNGNTYYNPSLKSRVTISVDTSKNQFSLRLSSVTAADTAVYYCAKSWVSWFASWGQGTLVTVSSGGGGSGGGGSGGGGSDIVMTQSPDSLAVSLGERATINCKSSQSVLSSSNNKNYLNWYQQKPGQPPKLLIYWASTRESGVPDRFSGSGSGTDFTLTISSLQAEDVAVYYCQQHYSVPFTFGPGTKVDIKGGGGSEVQLVESGGGLVQPGGSLKLSCAASGFTFNKYAMNWVRQAPGKGLEWVARIRSKYNNYATYYADSVKDRFTISRDDSKNTAYLQMNNLKTEDTAVYYCVRHGNFGNSYISYWAYWGQGTLVTVSSGGGGSGGGGSGGGGSQTVVTQEPSLTVSPGGTVTLTCGSSTGAVTSGYYPNWVQQKPGQAPRGLIGGTKFLAPGTPARFSGSLLGGKAALTLSGVQPEDEAEYYCALWYSNRWVFGGGTKLTVL

SEQ ID NO: 224 - DNA, 1497 bp, Artificial Sequence
  MCSP-F9 VH-VL x H2C VH-VL
caggtgcagctgcaagagtctggcccaggactggtgaagccttcggagaccctgtccctcacctgcgttgtctctggtggctccatcagcagtagtaactggtggagctgggtccgccagcccccagggaagggactggagtggcttgggactatctattataatgggaatacctactacaacccgtccctcaagagtcgagtcaccatctccgtagacacgtccaagaaccagttctccctgaggctgagctctgtgaccgccgcagacacggccgtgtattactgtgcgaaatcctgggtctcctggtttgcttcctggggtcaaggaaccttggtcaccgtctcctcaggtggtggtggttctggcggcggcggctccggtggtggtggttctgatatcgtgatgacacagtctccagactccctggctgtgtctctgggcgagagggccaccatcaactgcaagtccagccagagtgtcttatccagctccaacaataagaactacttaaattggtaccagcagaaaccaggacagcctcctaagttgctcatttactgggcatctacccgggaatccggggtccctgaccgattcagtggcagcgggtctgggacagatttcactctcaccatcagcagcctgcaggctgaagatgtggcagtttattactgtcagcaacattatagtgttccattcactttcggccctgggaccaaagtggatatcaaaggaggtggtggctccgaggtgcagctggtcgagtctggaggaggattggtgcagcctggagggtcattgaaactctcatgtgcagcctctggattcaccttcaataagtacgccatgaactgggtccgccaggctccaggaaagggtttggaatgggttgctcgcataagaagtaaatataataattatgcaacatattatgccgattcagtgaaagacaggttcaccatctccagagatgattcaaaaaacactgcctatctacaaatgaacaacttgaaaactgaggacactgccgtgtactactgtgtgagacatgggaacttcggtaatagctacatatcctactgggcttactggggccaagggactctggtcaccgtctcctcaggtggtggtggttctggcggcggcggctccggtggtggtggttctcagactgttgtgactcaggaaccttcactcaccgtatcacctggtggaacagtcacactcacttgtggctcctcgactggggctgttacatctggctactacccaaactgggtccaacaaaaaccaggtcaggcaccccgtggtctaataggtgggactaagttcctcgcccccggtactcctgccagattctcaggctccctgcttggaggcaaggctgccctcaccctctcaggggtacagccagaggatgaggcagaatattactgtgctctatggtacagcaaccgctgggtgttcggtggaggaaccaaactgactgtccta

SEQ ID NO: 225 - protein, 500 aa, Artificial Sequence
  MCSP-F9 VH-VL-P x H2C VH-VL-P
EVQLQESGPGLVKPSETLSLTCVVSGGSISSSNWWSWVRQPPGKGLEWLGTIYYNGNTYYNPSLKSRVTISVDTSKNQFSLRLSSVTAADTAVYYCAKSWVSWFASWGQGTLVTVSSGGGGSGGGGSGGGGSELVMTQSPDSLAVSLGERATINCKSSQSVLSSSNNKNYLNWYQQKPGQPPKLLIYWASTRESGVPDRFSGSGSGTDFTLTISSLQAEDVAVYYCQQHYSVPFTFGPGTKVDIKSGGGGSEVQLLESGGGLVQPGGSLKLSCAASGFTFNKYAMNWVRQAPGKGLEWVARIRSKYNNYATYYADSVKDRFTISRDDSKNTAYLQMNNLKTEDTAVYYCVRHGNFGNSYISYWAYWGQGTLVTVSSGGGGSGGGGSGGGGSELVVTQEPSLTVSPGGTVTLTCGSSTGAVTSGYYPNWVQQKPGQAPRGLIGGTKFLAPGTPARFSGSLLGGKAALTLSGVQPEDEAEYYCALWYSNRWVFGGGTKLTVL

SEQ ID NO: 226 - DNA, 1500 bp, Artificial Sequence
  MCSP-F9 VH-VL-P x H2C VH-VL-P
gaggtgcagctgcaagagtctggcccaggactggtgaagccttcggagaccctgtccctcacctgcgttgtctctggtggctccatcagcagtagtaactggtggagctgggtccgccagcccccagggaagggactggagtggcttgggactatctattataatgggaatacctactacaacccgtccctcaagagtcgagtcaccatctccgtagacacgtccaagaaccagttctccctgaggctgagctctgtgaccgccgcagacacggccgtgtattactgtgcgaaatcctgggtctcctggtttgcttcctggggtcaaggaaccttggtcaccgtctcctcaggtggtggtggttctggcggcggcggctccggtggtggtggttctgagctcgtgatgacacagtctccagactccctggctgtgtctctgggcgagagggccaccatcaactgcaagtccagccagagtgtcttatccagctccaacaataagaactacttaaattggtaccagcagaaaccaggacagcctcctaagttgctcatttactgggcatctacccgggaatccggggtccctgaccgattcagtggcagcgggtctgggacagatttcactctcaccatcagcagcctgcaggctgaagatgtggcagtttattactgtcagcaacattatagtgttccattcactttcggccctgggaccaaagtggatatcaaatccggaggtggtggatccgaggtgcagctgctcgagtctggaggaggattggtgcagcctggagggtcattgaaactctcatgtgcagcctctggattcaccttcaataagtacgccatgaactgggtccgccaggctccaggaaagggtttggaatgggttgctcgcataagaagtaaatataataattatgcaacatattatgccgattcagtgaaagacaggttcaccatctccagagatgattcaaaaaacactgcctatctacaaatgaacaacttgaaaactgaggacactgccgtgtactactgtgtgagacatgggaacttcggtaatagctacatatcctactgggcttactggggccaagggactctggtcaccgtctcctcaggtggtggtggttctggcggcggcggctccggtggtggtggttctgagctcgttgtgactcaggaaccttcactcaccgtatcacctggtggaacagtcacactcacttgtggctcctcgactggggctgttacatctggctactacccaaactgggtccaacaaaaaccaggtcaggcaccccgtggtctaataggtgggactaagttcctcgcccccggtactcctgccagattctcaggctccctgcttggaggcaaggctgccctcaccctctcaggggtacagccagaggatgaggcagaatattactgtgctctatggtacagcaaccgctgggtgttcggtggaggaaccaaactgactgtccta

SEQ ID NO: 227 - protein, 500 aa, Artificial Sequence
  MCSP-F9 VH-VL-P x G4H VH-VL-P
EVQLQESGPGLVKPSETLSLTCVVSGGSISSSNWWSWVRQPPGKGLEWLGTIYYNGNTYYNPSLKSRVTISVDTSKNQFSLRLSSVTAADTAVYYCAKSWVSWFASWGQGTLVTVSSGGGGSGGGGSGGGGSELVMTQSPDSLAVSLGERATINCKSSQSVLSSSNNKNYLNWYQQKPGQPPKLLIYWASTRESGVPDRFSGSGSGTDFTLTISSLQAEDVAVYYCQQHYSVPFTFGPGTKVDIKSGGGGSEVQLLESGGGLVQPGGSLKLSCAASGFTFNRYAMNWVRQAPGKGLEWVARIRSKYNNYATYYADSVKGRFTISRDDSKNTAYLQMNNLKTEDTAVYYCVRHGNFGNSYLSYFAYWGQGTLVTVSSGGGGSGGGGSGGGGSELVVTQEPSLTVSPGGTVTLTCGSSTGAVTSGYYPNWVQQKPGQAPRGLIGGTKFLAPGTPARFSGSLLGGKAALTLSGVQPEDEAEYYCALWYSNRWVFGGGTKLTVL

SEQ ID NO: 228 - DNA, 1500 bp, Artificial Sequence
  MCSP-F9 VH-VL-P x G4H VH-VL-P
gaggtgcagctgcaagagtctggcccaggactggtgaagccttcggagaccctgtccctcacctgcgttgtctctggtggctccatcagcagtagtaactggtggagctgggtccgccagcccccagggaagggactggagtggcttgggactatctattataatgggaatacctactacaacccgtccctcaagagtcgagtcaccatctccgtagacacgtccaagaaccagttctccctgaggctgagctctgtgaccgccgcagacacggccgtgtattactgtgcgaaatcctgggtctcctggtttgcttcctggggtcaaggaaccttggtcaccgtctcctcaggtggtggtggttctggcggcggcggctccggtggtggtggttctgagctcgtgatgacacagtctccagactccctggctgtgtctctgggcgagagggccaccatcaactgcaagtccagccagagtgtcttatccagctccaacaataagaactacttaaattggtaccagcagaaaccaggacagcctcctaagttgctcatttactgggcatctacccgggaatccggggtccctgaccgattcagtggcagcgggtctgggacagatttcactctcaccatcagcagcctgcaggctgaagatgtggcagtttattactgtcagcaacattatagtgttccattcactttcggccctgggaccaaagtggatatcaaatccggaggtggtggatccgaggtgcagctgctcgagtctggaggaggattggtgcagcctggagggtcattgaaactctcatgtgcagcctctggattcaccttcaatcgctacgccatgaactgggtccgccaggctccaggaaagggtttggaatgggttgctcgcataagaagtaaatataataattatgcaacatattatgccgattcagtgaaagggaggttcaccatctccagagatgattcaaaaaacactgcctatctacaaatgaacaacttgaaaactgaggacactgccgtgtactactgtgtgagacatgggaacttcggtaatagctacttatcctacttcgcttactggggccaagggactctggtcaccgtctcctcaggtggtggtggttctggcggcggcggctccggtggtggtggttctgagctcgttgtgactcaggaaccttcactcaccgtatcacctggtggaacagtcacactcacttgtggctcctcgactggggctgttacatctggctactacccaaactgggtccaacaaaaaccaggtcaggcaccccgtggtctaataggtgggactaagttcctcgcccccggtactcctgccagattctcaggctccctgcttggaggcaaggctgccctcaccctctcaggggtacagccagaggatgaggcagaatattactgtgctctatggtacagcaaccgctgggtgttcggtggaggaaccaaactgactgtccta

SEQ ID NO: 229 - protein, 267 aa, Artificial Sequence
  1-27 CD3 epsilon-Fc
QDGNEEMGGITQTPYKVSISGTTVILTSGEPKSCDKTHTCPPCPAPELLGGPSVFLFPPKPKDTLMISRTPEVTCVVVDVSHEDPEVKFNWYVDGVEVHNAKTKPREEQYNSTYRVVSVLTVLHQDWLNGKEYKCKVSNKALPAPIEKTISKAKGQPREPQVYTLPPSREEMTKNQVSLTCLVKGFYPSDIAVEWESNGQPENNYKTTPPVLDSDGSFFLYSKLTVDKSRWQQGNVFSCSVMHEALHNHYTQKSLSLSPGKHHHHHH

SEQ ID NO: 230 - DNA, 858 bp, Artificial Sequence
  1-27 CD3 epsilon-Fc
atgggatggagctgtatcatcctcttcttggtagcaacagctacaggtgtacactcccaagatggtaatgaagaaatgggtggtattacacagacaccatataaagtctccatctctggaaccacagtaatattgacatccggagagcccaaatcttgtgacaaaactcacacatgcccaccgtgcccagcacctgaactcctggggggaccgtcagtcttcctcttccccccaaaacccaaggacaccctcatgatctcccggacccctgaggtcacatgcgtggtggtggacgtgagccacgaagaccctgaggtcaagttcaactggtacgtggacggcgtggaggtgcataatgccaagacaaagccgcgggaggagcagtacaacagcacgtaccgtgtggtcagcgtcctcaccgtcctgcaccaggactggctgaatggcaaggagtacaagtgcaaggtctccaacaaagccctcccagcccccatcgagaaaaccatctccaaagccaaagggcagccccgagaaccacaggtgtacaccctgcccccatcccgggaggagatgaccaagaaccaggtcagcctgacctgcctggtcaaaggcttctatcccagcgacatcgccgtggagtgggagagcaatgggcagccggagaacaactacaagaccacgcctcccgtgctggactccgacggctccttcttcctctatagcaagctcaccgtggacaagagcaggtggcagcaggggaacgtcttctcatgctccgtgatgcatgaggctctgcacaaccactacacgcagaagagcctctccctgtccccgggtaaacatcatcaccatcatcat

SEQ ID NO: 231 - protein, 333 aa, Artificial Sequence
  human 1-27 CD3 epsilon-EpCAM
QDGNEEMGGITQTPYKVSISGTTVILTDYKDDDDKTASFAAAQKECVCENYKLAVNCFLNDNGQCQCTSIGAQNTVLCSKLAAKCLVMKAEMNGSKLGRRAKPEGALQNNDGLYDPDCDESGLFKAKQCNGTSTCWCVNTAGVRRTDKDTEITCSERVRTYWIIIELKHKAREKPYDVQSLRTALEEAIKTRYQLDPKFITNILYEDNVITIDLVQNSSQKTQNDVDIADVAYYFEKDVKGESLFHSKKMDLRVNGEQLDLDPGQTLIYYVDEKAPEFSMQGLKAGVIAVIVVVVIAIVAGIVVLVISRKKRMAKYEKAEIKEMGEMHRELNA

SEQ ID NO: 232 - DNA, 1056 bp, Artificial Sequence
  human 1-27 CD3 epsilon-EpCAM
atgggatggagctgtatcatcctcttcttggtagcaacagctacaggtgtacactcccaagatggtaatgaagaaatgggtggtattacacagacaccatataaagtctccatctctggaaccacagtaatattgacagattacaaggacgacgatgacaagactgcgagttttgccgcagctcagaaagaatgtgtctgtgaaaactacaagctggccgtaaactgctttttgaatgacaatggtcaatgccagtgtacttcgattggtgcacaaaatactgtcctttgctcaaagctggctgccaaatgtttggtgatgaaggcagaaatgaacggctcaaaacttgggagaagagcgaaacctgaaggggctctccagaacaatgatggcctttacgatcctgactgcgatgagagcgggctctttaaggccaagcagtgcaacggcacctccacgtgctggtgtgtgaacactgctggggtcagaagaactgacaaggacactgaaataacctgctctgagcgagtgagaacctactggatcatcattgaattaaaacacaaagcaagagaaaaaccttatgatgttcaaagtttgcggactgcacttgaggaggcgatcaaaacgcgttatcaactggatccaaaatttatcacaaatattttgtatgaggataatgttatcactattgatctggttcaaaattcttctcagaaaactcagaatgatgtggacatagctgatgtggcttattattttgaaaaagatgttaaaggtgaatccttgtttcattctaagaaaatggacctgagagtaaatggggaacaactggatctggatcctggtcaaactttaatttattatgtcgatgaaaaagcacctgaattctcaatgcagggtctaaaagctggtgttattgctgttattgtggttgtggtgatagcaattgttgctggaattgttgtgctggttatttccagaaagaagagaatggcaaagtatgagaaggctgagataaaggagatgggtgagatgcatagggaactcaatgca

SEQ ID NO: 233 - protein, 333 aa, Artificial Sequence
  marmoset 1-27 CD3 epsilon-EpCAM
QDGNEEMGDTTQNPYKVSISGTTVTLTDYKDDDDKTASFAAAQKECVCENYKLAVNCFLNDNGQCQCTSIGAQNTVLCSKLAAKCLVMKAEMNGSKLGRRAKPEGALQNNDGLYDPDCDESGLFKAKQCNGTSTCWCVNTAGVRRTDKDTEITCSERVRTYWIIIELKHKAREKPYDVQSLRTALEEAIKTRYQLDPKFITNILYEDNVITIDLVQNSSQKTQNDVDIADVAYYFEKDVKGESLFHSKKMDLRVNGEQLDLDPGQTLIYYVDEKAPEFSMQGLKAGVIAVIVVVVIAIVAGIVVLVISRKKRMAKYEKAEIKEMGEMHRELNA

SEQ ID NO: 234 - DNA, 1056 bp, Artificial Sequence
  marmoset 1-27 CD3 epsilon-EpCAM
atgggatggagctgtatcatcctcttcttggtagcaacagctacaggtgtacactcccaggacggtaatgaagaaatgggtgatactacacagaacccatataaagtttccatctcaggaaccacagtaacactgacagattacaaggacgacgatgacaagactgcgagttttgccgcagctcagaaagaatgtgtctgtgaaaactacaagctggccgtaaactgctttttgaatgacaatggtcaatgccagtgtacttcgattggtgcacaaaatactgtcctttgctcaaagctggctgccaaatgtttggtgatgaaggcagaaatgaacggctcaaaacttgggagaagagcgaaacctgaaggggctctccagaacaatgatggcctttacgatcctgactgcgatgagagcgggctctttaaggccaagcagtgcaacggcacctccacgtgctggtgtgtgaacactgctggggtcagaagaactgacaaggacactgaaataacctgctctgagcgagtgagaacctactggatcatcattgaattaaaacacaaagcaagagaaaaaccttatgatgttcaaagtttgcggactgcacttgaggaggcgatcaaaacgcgttatcaactggatccaaaatttatcacaaatattttgtatgaggataatgttatcactattgatctggttcaaaattcttctcagaaaactcagaatgatgtggacatagctgatgtggcttattattttgaaaaagatgttaaaggtgaatccttgtttcattctaagaaaatggacctgagagtaaatggggaacaactggatctggatcctggtcaaactttaatttattatgtcgatgaaaaagcacctgaattctcaatgcagggtctaaaagctggtgttattgctgttattgtggttgtggtgatagcaattgttgctggaattgttgtgctggttatttccagaaagaagagaatggcaaagtatgagaaggctgagataaaggagatgggtgagatgcatagggaactcaatgca

SEQ ID NO: 235 - protein, 333 aa, Artificial Sequence; identical to SEQ ID NO: 233
  tamarin 1-27 CD3 epsilon-EpCAM

SEQ ID NO: 236 - DNA, 1056 bp, Artificial Sequence; identical to SEQ ID NO: 234
  tamarin 1-27 CD3 epsilon-EpCAM

SEQ ID NO: 237 - protein, 333 aa, Artificial Sequence
  squirrel monkey 1-27 CD3 epsilon-EpCAM
QDGNEEIGDTTQNPYKVSISGTTVTLTDYKDDDDKTASFAAAQKECVCENYKLAVNCFLNDNGQCQCTSIGAQNTVLCSKLAAKCLVMKAEMNGSKLGRRAKPEGALQNNDGLYDPDCDESGLFKAKQCNGTSTCWCVNTAGVRRTDKDTEITCSERVRTYWIIIELKHKAREKPYDVQSLRTALEEAIKTRYQLDPKFITNILYEDNVITIDLVQNSSQKTQNDVDIADVAYYFEKDVKGESLFHSKKMDLRVNGEQLDLDPGQTLIYYVDEKAPEFSMQGLKAGVIAVIVVVVIAIVAGIVVLVISRKKRMAKYEKAEIKEMGEMHRELNA

SEQ ID NO: 238 - DNA, 1056 bp, Artificial Sequence
  squirrel monkey 1-27 CD3 epsilon-EpCAM
atgggatggagctgtatcatcctcttcttggtagcaacagctacaggtgtacactcccaggacggtaatgaagagattggtgatactacccagaacccatataaagtttccatctcaggaaccacagtaacactgacagattacaaggacgacgatgacaagactgcgagttttgccgcagctcagaaagaatgtgtctgtgaaaactacaagctggccgtaaactgctttttgaatgacaatggtcaatgccagtgtacttcgattggtgcacaaaatactgtcctttgctcaaagctggctgccaaatgtttggtgatgaaggcagaaatgaacggctcaaaacttgggagaagagcgaaacctgaaggggctctccagaacaatgatggcctttacgatcctgactgcgatgagagcgggctctttaaggccaagcagtgcaacggcacctccacgtgctggtgtgtgaacactgctggggtcagaagaactgacaaggacactgaaataacctgctctgagcgagtgagaacctactggatcatcattgaattaaaacacaaagcaagagaaaaaccttatgatgttcaaagtttgcggactgcacttgaggaggcgatcaaaacgcgttatcaactggatccaaaatttatcacaaatattttgtatgaggataatgttatcactattgatctggttcaaaattcttctcagaaaactcagaatgatgtggacatagctgatgtggcttattattttgaaaaagatgttaaaggtgaatccttgtttcattctaagaaaatggacctgagagtaaatggggaacaactggatctggatcctggtcaaactttaatttattatgtcgatgaaaaagcacctgaattctcaatgcagggtctaaaagctggtgttattgctgttattgtggttgtggtgatagcaattgttgctggaattgttgtgctggttatttccagaaagaagagaatggcaaagtatgagaaggctgagataaaggagatgggtgagatgcatagggaactcaatgca

SEQ ID NO: 239 - protein, 333 aa, Artificial Sequence
  swine 1-27 CD3 epsilon-EpCAM
QEDIERPDEDTQKTFKVSISGDKVELTDYKDDDDKTASFAAAQKECVCENYKLAVNCFLNDNGQCQCTSIGAQNTVLCSKLAAKCLVMKAEMNGSKLGRRAKPEGALQNNDGLYDPDCDESGLFKAKQCNGTSTCWCVNTAGVRRTDKDTEITCSERVRTYWIIIELKHKAREKPYDVQSLRTALEEAIKTRYQLDPKFITNILYEDNVITIDLVQNSSQKTQNDVDIADVAYYFEKDVKGESLFHSKKMDLRVNGEQLDLDPGQTLIYYVDEKAPEFSMQGLKAGVIAVIVVVVIAIVAGIVVLVISRKKRMAKYEKAEIKEMGEMHRELNA

SEQ ID NO: 240 - DNA, 1056 bp, Artificial Sequence
  swine 1-27 CD3 epsilon-EpCAM
atgggatggagctgtatcatcctcttcttggtagcaacagctacaggtgtacactcccaagaagacattgaaagaccagatgaagatacacagaaaacatttaaagtctccatctctggagacaaagtagagctgacagattacaaggacgacgatgacaagactgcgagttttgccgcagctcagaaagaatgtgtctgtgaaaactacaagctggccgtaaactgctttttgaatgacaatggtcaatgccagtgtacttcgattggtgcacaaaatactgtcctttgctcaaagctggctgccaaatgtttggtgatgaaggcagaaatgaacggctcaaaacttgggagaagagcgaaacctgaaggggctctccagaacaatgatggcctttacgatcctgactgcgatgagagcgggctctttaaggccaagcagtgcaacggcacctccacgtgctggtgtgtgaacactgctggggtcagaagaactgacaaggacactgaaataacctgctctgagcgagtgagaacctactggatcatcattgaattaaaacacaaagcaagagaaaaaccttatgatgttcaaagtttgcggactgcacttgaggaggcgatcaaaacgcgttatcaactggatccaaaatttatcacaaatattttgtatgaggataatgttatcactattgatctggttcaaaattcttctcagaaaactcagaatgatgtggacatagctgatgtggcttattattttgaaaaagatgttaaaggtgaatccttgtttcattctaagaaaatggacctgagagtaaatggggaacaactggatctggatcctggtcaaactttaatttattatgtcgatgaaaaagcacctgaattctcaatgcagggtctaaaagctggtgttattgctgttattgtggttgtggtgatagcaattgttgctggaattgttgtgctggttatttccagaaagaagagaatggcaaagtatgagaaggctgagataaaggagatgggtgagatgcatagggaactcaatgca

SEQ ID NO: 241 - protein, 186 aa, Homo sapiens
QDGNEEMGGITQTPYKVSISGTTVILTCPQYPGSEILWQHNDKNIGGDEDDKNIGSDEDHLSLKEFSELEQSGYYVCYPRGSKPEDANFYLYLRARVCENCMEMDVMSVATIVIVDICITGGLLLLVYYWSKNRKAKAKPVTRGAGAGGRQRGQNKERPPPVPNPDYEPIRKGQRDLYSGLNQRRI

SEQ ID NO: 242 - DNA, 621 bp, Homo sapiens
atgcagtcgggcactcactggagagttctgggcctctgcctcttatcagttggcgtttgggggcaagatggtaatgaagaaatgggtggtattacacagacaccatataaagtctccatctctggaaccacagtaatattgacatgccctcagtatcctggatctgaaatactatggcaacacaatgataaaaacataggcggtgatgaggatgataaaaacataggcagtgatgaggatcacctgtcactgaaggaattttcagaattggagcaaagtggttattatgtctgctaccccagaggaagcaaaccagaagatgcgaacttttatctctacctgagggcacgcgtgtgtgagaactgcatggagatggatgtgatgtcggtggccacaattgtcatagtggacatctgcatcactgggggcttgctgctgctggtttactactggagcaagaatagaaaggccaaggccaagcctgtgacacgaggagcgggtgctggcggcaggcaaaggggacaaaacaaggagaggccaccacctgttcccaacccagactatgagcccatccggaaaggccagcgggacctgtattctggcctgaatcagagacgcatc

SEQ ID NO: 243 - protein, 19 aa, Artificial Sequence
  19 amino acid immunoglobulin leader peptide
MGWSCIILFLVATATGVHS

SEQ ID NO: 244 - DNA, 57 bp, Artificial Sequence
  19 amino acid immunoglobulin leader peptide coding sequence
atgggatggagctgtatcatcctcttcttggtagcaacagctacaggtgtacactcc

SEQ ID NO: 245 - protein, 324 aa, Mus musculus
AKTTPPSVYPLAPGSAAQTNSMVTLGCLVKGYFPEPVTVTWNSGSLSSGVHTFPAVLQSDLYTLSSSVTVPSSTWPSETVTCNVAHPASSTKVDKKIVPRDCGCKPCICTVPEVSSVFIFPPKPKDVLTITLTPKVTCVVVDISKDDPEVQFSWFVDDVEVHTAQTQPREEQFNSTFRSVSELPIMHQDWLNGKEFKCRVNSAAFPAPIEKTISKTKGRPKAPQVYTIPPPKEQMAKDKVSLTCMITDFFPEDITVEWQWNGQPAENYKNTQPIMDTDGSYFVYSKLNVQKSNWEAGNTFTCSVLHEGLHNHHTEKSLSHSPGK

SEQ ID NO: 246 - DNA, 972 bp, Mus musculus
gccaaaacgacacccccatctgtctatccactggcccctggatctgctgcccaaactaactccatggtgaccctgggatgcctggtcaagggctatttccctgagccagtgacagtgacctggaactctggatccctgtccagcggtgtgcacaccttcccagctgtcctgcagtctgacctctacactctgagcagctcagtgactgtcccctccagcacctggcccagcgagaccgtcacctgcaacgttgcccacccggccagcagcaccaaggtggacaagaaaattgtgcccagggattgtggttgtaagccttgcatatgtacagtcccagaagtatcatctgtcttcatcttccccccaaagcccaaggatgtgctcaccattactctgactcctaaggtcacgtgtgttgtggtagacatcagcaaggatgatcccgaggtccagttcagctggtttgtagatgatgtggaggtgcacacagctcagacgcaaccccgggaggagcagttcaacagcactttccgctcagtcagtgaacttcccatcatgcaccaggactggctcaatggcaaggagttcaaatgcagggtcaacagtgcagctttccctgcccccatcgagaaaaccatctccaaaaccaaaggcagaccgaaggctccacaggtgtacaccattccacctcccaaggagcagatggccaaggataaagtcagtctgacctgcatgataacagacttcttccctgaagacattactgtggagtggcagtggaatgggcagccagcggagaactacaagaacactcagcccatcatggacacagatggctcttacttcgtctacagcaagctcaatgtgcagaagagcaactgggaggcaggaaatactttcacctgctctgtgttacatgagggcctgcacaaccaccatactgagaagagcctctcccactctcctggtaaa

SEQ ID NO: 247 - protein, 106 aa, Homo sapiens
GQPKAAPSVTLFPPSSEELQANKATLVCLISDFYPGAVTVAWKADSSPVKAGVETTTPSKQSNNKYAASSYLSLTPEQWKSHKSYSCQVTHEGSTVEKTVAPTECS

SEQ ID NO: 248 - DNA, 318 bp, Homo sapiens
ggtcagcccaaggctgccccctcggtcactctgttcccaccctcctctgaggagcttcaagccaacaaggccacactggtgtgtctcataagtgacttctacccgggagccgtgacagtggcctggaaggcagatagcagccccgtcaaggcgggagtggagaccaccacaccctccaaacaaagcaacaacaagtacgcggccagcagctacctgagcctgacgcctgagcagtggaagtcccacaaaagctacagctgccaggtcacgcatgaagggagcaccgtggagaagacagtggcccctacagaatgttca

SEQ ID NO: 249 - protein, 800 aa, Homo sapiens
DYKDDDDKSRTRSGSQLDGGLVLFSHRGTLDGGFRFRLSDGEHTSPGHFFRVTAQKQVLLSLKGSQTLTVCPGSVQPLSSQTLRASSSAGTDPQLLLYRVVRGPQLGRLFHAQQDSTGEALVNFTQAEVYAGNILYEHEMPPEPFWEAHDTLELQLSSPPARDVAATLAVAVSFEAACPQRPSHLWKNKGLWVPEGQRARITVAALDASNLLASVPSPQRSEHDVLFQVTQFPSRGQLLVSEEPLHAGQPHFLQSQLAAGQLVYAHGGGGTQQDGFHFRAHLQGPAGASVAGPQTSEAFAITVRDVNERPPQPQASVPLRLTRGSRAPISRAQLSVVDPDSAPGEIEYEVQRAPHNGFLSLVGGGLGPVTRFTQADVDSGRLAFVANGSSVAGIFQLSMSDGASPPLPMSLAVDILPSAIEVQLRAPLEVPQALGRSSLSQQQLRVVSDREEPEAAYRLIQGPQYGHLLVGGRPTSAFSQFQIDQGEVVFAFTNSSSSHDHFRVLALARGVNASAVVNVTVRALLHVWAGGPWPQGATLRLDPTVLDAGELANRTDSVPRFRLLEGPRHGRVVRVPRARTEPGGSQLVEQFTQQDLEDGRLGLEVGRPEGRAPGPAGDSLTLELWAQGVPPAVASLDFATEPYNAARPYSVALLSVPEAARTEAGKPESSTPTGEPGPMASSPEPAVAKGGFLSFLEANMFSVIIPMCLVLLLLALILPLLFYLRKRNKTGKHDVQVLTAKPRNGLAGDTETFRKVEPGQAIPLTAVPGQGPPPGGQPDPELLQFCRTPNPALKNGQYWV

SEQ ID NO: 250 - DNA, 2457 bp, Homo sapiens
atgggatggagctgtatcatcctcttcttggtagcaacagctacaggtgtacactccgactacaaagacgatgacgacaagtcccgtacgagatctggatcccaattggacggcgggctcgtgctgttctcacacagaggaaccctggatggaggcttccgcttccgcctctctgacggcgagcacacttcccccggacacttcttccgagtgacggcccagaagcaagtgctcctctcgctgaagggcagccagacactgactgtctgcccagggtccgtccagccactcagcagtcagaccctcagggccagctccagcgcaggcactgacccccagctcctgctctaccgtgtggtgcggggcccccagctaggccggctgttccacgcccagcaggacagcacaggggaggccctggtgaacttcactcaggcagaggtctacgctgggaatattctgtatgagcatgagatgccccccgagcccttttgggaggcccatgataccctagagctccagctgtcctcgccgcctgcccgggacgtggccgccacccttgctgtggctgtgtcttttgaggctgcctgtccccagcgccccagccacctctggaagaacaaaggtctctgggtccccgagggccagcgggccaggatcaccgtggctgctctggatgcctccaatctcttggccagcgttccatcaccccagcgctcagagcatgatgtgctcttccaggtcacacagttccccagccgcggccagctgttggtgtccgaggagcccctccatgctgggcagccccacttcctgcagtcccagctggctgcagggcagctagtgtatgcccacggcggtgggggcacccagcaggatggcttccactttcgtgcccacctccaggggccagcaggggcctccgtggctggaccccaaacctcagaggcctttgccatcacggtgagggatgtaaatgagcggccccctcagccacaggcctctgtcccactccggctcacccgaggctctcgtgcccccatctcccgggcccagctgagtgtggtggacccagactcagctcctggggagattgagtacgaggtccagcgggcaccccacaacggcttcctcagcctggtgggtggtggcctggggcccgtgacccgcttcacgcaagccgatgtggattcagggcggctggccttcgtggccaacgggagcagcgtggcaggcatcttccagctgagcatgtctgatggggccagcccacccctgcccatgtccctggctgtggacatcctaccatccgccatcgaggtgcagctgcgggcacccctggaggtgccccaagctttggggcgctcctcactgagccagcagcagctccgggtggtttcagatcgggaggagccagaggcagcataccggttgatccagggaccccagtatgggcatctcctggtgggcgggcggcccacctcggccttcagccaattccagatagaccagggcgaggtggtctttgccttcaccaactcctcctcctctcatgaccacttcagagtcctggcactggctaggggtgtcaatgcatcagccgtagtgaacgtcactgtgagggctctgctgcatgtgtgggcaggtgggccatggccccagggtgccaccctgcgcctggaccccaccgtcctagatgctggcgagctggccaaccgcacagacagtgtgccgcgcttccgcctcctggagggaccccggcatggccgcgtggtccgcgtgccccgagccaggacggagcccgggggcagccagctggtggagcagttcactcagcaggaccttgaggacgggaggctggggctggaggtgggcaggccagaggggagggcccccggccccgcaggtgacagtctcactctggagctgtgggcacagggcgtcccgcctgctgtggcctccctggactttgccactgagccttacaatgctgcccggccctacagcgtggccctgctcagtgtccccgaggccgcccggacggaagcagggaagccagagagcagcacccccacaggcgagccaggccccatggcatccagccctgagcccgctgtggccaagggaggcttcctgagctttctagaggccaacatgttcagcgtcatcatccccatgtgcctggtacttctgctcctggcgctcatcctgcccctgctcttctacctccgaaaacgcaacaagacgggcaagcatgacgtccaggtcctgactgccaagccccgcaacggcctggctggtgacaccgagacctttcgcaaggtggagccaggccaggccatcccgctcacagctgtgcctggccaggggccccctccaggaggccagcctgacccagagctgctgcagttctgccggacacccaaccctgcccttaagaatggccagtactgggtg

SEQ ID NO: 251 - protein, 807 aa, Macaca fascicularis
  misc_feature (714)..(714): Xaa can be any naturally occurring amino acid
PSNGRVVLRAAPGTEVRSFTQAQLDGGLVLFSHRGTLDGGFRFGLSDGEHTSSGHFFRVTAQKQVLLSLEGSRTLTVCPGSVQPLSSQTLRASSSAGTDPQLLLYRVVRGPQLGRLFHAQQDSTGEALVNFTQAEVYAGNILYEHEMPTEPFWEAHDTLELQLSSPPARDVAATLAVAVSFEAACPQRPSHLWKNKGLWVPEGQRAKITMAALDASNLLASVPSSQRLEHDVLFQVTQFPSRGQLLVSEEPLHAGQPHFLQSQLAAGQLVYAHGGGGTQQDGFHFRAHLQGPAGATVAGPQTSEAFAITVRDVNERPPQPQASVPLRITRGSRAPISRAQLSVVDPDSAPGEIEYEVQRAPHNGFLSLVGGGPGPVNRFTQADVDSGRLAFVANGSSVAGVFQLSMSDGASPPLPMSLAVDILPSAIEVQLQAPLEVPQALGRSSLSQQQLRVVSDREEPEAAYRLIQGPKYGHLLVGGQPASAFSQLQIDQGEVVFAFTNFSSSHDHFRVLALARGVNASAVVNITVRALLHVWAGGPWPQGATLRLDPTILDAGELANRTGSVPRFRLLEGPRHGRVVRVPRARMEPGGSQLVEQFTQQDLEDGRLGLEVGRPEGRAPSPTGDSLTLELWAQGVPPAVASLDFATEPYNAARPYSVALLSVPEATRTEAGKPESSTPTGEPGPMASSPVPAVAKGGFLGFLEANMFSVIIPXCLVLLLLALILPLLFYLRKRNKTGKHDVQVLTAKPRNGLAGDTETFRKVEPGQAIPLTAVPGQGPPPGGQPDPELLQFCRTPNPALKNGQYWV

SEQ ID NO: 252 - DNA, 2421 bp, Macaca fascicularis
cccagcaacggacgggtagtgctgcgggcggcgccgggcaccgaggtgcgcagcttcacgcaggcccagctggatggcggactcgtgctgttctcacacagaggaaccctggatggaggcttccgcttcggcctctccgatggcgagcacacttcctctggacacttcttccgagtgacggcccagaagcaagtgctcctctcgctggagggcagccggacactgactgtctgcccagggtccgtgcagccactcagcagtcagaccctcagagccagctccagcgcaggcaccgacccccagctcctgctctaccgtgtggtgcggggcccccagctaggccggctgttccatgcccagcaggacagcacaggggaggccctggtgaacttcactcaggcagaggtctatgctgggaatattctgtatgagcatgagatgcccaccgagcccttctgggaggcccatgataccctagagctccagctgtcctcaccacctgcccgggacgtggctgccacccttgctgtggctgtgtcttttgaggctgcctgtccccagcgccccagccacctctggaagaacaaaggtctctgggtccccgagggccagcgggccaagatcaccatggctgccctggatgcctccaacctcttggccagcgttccatcatcccagcgcctagagcatgatgtgctcttccaggtcacgcagttccccagccggggccagctattggtgtctgaggagcccctccacgctgggcagccccacttcctgcagtcccagctggctgcagggcagctagtgtatgcccacggcggtgggggtacccaacaggatggcttccactttcgtgcccacctccaggggccagcaggggccaccgtggctggaccccaaacctcagaggcttttgccatcacggtgcgggatgtaaatgagcggccccctcagccacaggcctctgtcccactccggatcacccgaggctctcgagcccccatctcccgggcccagctgagtgtcgtggacccagactcagctcctggggagattgagtatgaggtccagcgggcaccccacaacggcttcctcagcctggtgggtggtggcccggggcccgtgaaccgcttcacgcaagccgatgtggattcggggcggctggccttcgtggccaacgggagcagcgtagcaggcgtcttccagctgagcatgtctgatggggccagcccaccgctgcccatgtccctggccgtggacatcctaccatccgccatcgaggtgcagctgcaggcacccctggaggtgccccaagctttggggcgctcctcactgagccagcagcagctccgggtggtttcagatagggaggagccagaggcagcataccgcctcatccagggaccaaagtacgggcatctcctggtgggtgggcagcccgcctcggccttcagccaactccagatagaccagggcgaggtggtctttgccttcaccaacttctcctcctctcatgaccacttcagagtcctggcactggctaggggtgtcaacgcatcagccgtagtgaacatcactgtgagggctctgctgcacgtgtgggcaggtgggccatggccccagggtgctaccctgcgcctggacccaaccatcctagatgctggcgagctggccaaccgcacaggcagtgtgccccgcttccgcctcctggagggaccccggcatggccgcgtggtccgtgtgccccgagccaggatggagcctgggggcagccagctggtggagcagttcactcagcaggaccttgaggatgggaggctggggctggaggtgggcaggccagagggaagggcccccagccccacaggcgacagtctcactctggagctgtgggcacagggcgtcccacctgctgtggcctccctggactttgccactgagccttacaatgctgcccggccctacagcgtggccctgctcagtgtccccgaggccacccggacggaagcagggaagccagagagcagcacccccacaggcgagccaggccccatggcatctagccctgtgcctgctgtggccaagggaggcttcctgggcttccttgaggccaacatgttcagtgtcatcatccccrtgtgcctggtccttctgctcctggcgctcatcttgcccctgctcttctacctccgaaaacgcaacaagacgggcaagcatgacgtccaggtcctgactgccaagccccgcaatggtctggctggtgacactgagacctttcgcaaggtggagccaggccaggccatcccgctcacagctgtgcctggccaggggccccctccgggaggccagcctgacccagagctgctgcagttctgccggacacccaaccctgcccttaagaatggccagtactgggtg

SEQ ID NO: 253 - DNA, 18 bp, Artificial Sequence
  PCR primer for CD3 epsilon chain - forward primer
agagttctgggcctctgc

SEQ ID NO: 254 - DNA, 19 bp, Artificial Sequence
  PCR primer for CD3 epsilon chain - reverse primer
cggatgggctcatagtctg

SEQ ID NO: 255 - protein, 192 aa, Artificial Sequence
  His6-human CD3 epsilon
HHHHHHQDGNEEMGGITQTPYKVSISGTTVILTCPQYPGSEILWQHNDKNIGGDEDDKNIGSDEDHLSLKEFSELEQSGYYVCYPRGSKPEDANFYLYLRARVCENCMEMDVMSVATIVIVDICITGGLLLLVYYWSKNRKAKAKPVTRGAGAGGRQRGQNKERPPPVPNPDYEPIRKGQRDLYSGLNQRRI

SEQ ID NO: 256 - DNA, 633 bp, Artificial Sequence
  His6-human CD3 epsilon
atgggatggagctgtatcatcctcttcttggtagcaacagctacaggtgtacactcccatcatcaccatcatcatcaagatggtaatgaagaaatgggtggtattacacagacaccatataaagtctccatctctggaaccacagtaatattgacatgccctcagtatcctggatctgaaatactatggcaacacaatgataaaaacataggcggtgatgaggatgataaaaacataggcagtgatgaggatcacctgtcactgaaggaattttcagaattggagcaaagtggttattatgtctgctaccccagaggaagcaaaccagaagatgcgaacttttatctctacctgagggcacgcgtgtgtgagaactgcatggagatggatgtgatgtcggtggccacaattgtcatagtggacatctgcatcactgggggcttgctgctgctggtttactactggagcaagaatagaaaggccaaggccaagcctgtgacacgaggagcgggtgctggcggcaggcaaaggggacaaaacaaggagaggccaccacctgttcccaacccagactatgagcccatccggaaaggccagcgggacctgtattctggcctgaatcagagacgcatc

SEQ ID NO: 257 - protein, 505 aa, Artificial Sequence
  CD33 AH3 HL x H2C HL
QVQLVQSGAEVKKPGESVKVSCKASGYTFTNYGMNWVRQAPGQGLEWMGWINTYTGEPTYADDFKGRVTMSSDTSTSTAYLEINSLRSDDTAIYYCARWSWSDGYYVYFDYWGQGTTVTVSSGGGGSGGGGSGGGGSDIVMTQSPDSLTVSLGERTTINCKSSQSVLDSSKNKNSLAWYQQKPGQPPKLLLSWASTRESGIPDRFSGSGSGTDFTLTIDSLQPEDSATYYCQQSAHFPITFGQGTRLEIKSGGGGSEVQLVESGGGLVQPGGSLKLSCAASGFTFNKYAMNWVRQAPGKGLEWVARIRSKYNNYATYYADSVKDRFTISRDDSKNTAYLQMNNLKTEDTAVYYCVRHGNFGNSYISYWAYWGQGTLVTVSSGGGGSGGGGSGGGGSQTVVTQEPSLTVSPGGTVTLTCGSSTGAVTSGYYPNWVQQKPGQAPRGLIGGTKFLAPGTPARFSGSLLGGKAALTLSGVQPEDEAEYYCALWYSNRWVFGGGTKLTVL

SEQ ID NO: 258 - DNA, 1515 bp, Artificial Sequence
  CD33 AH3 HL x H2C HL
caggtgcagctggtgcagtctggagctgaggtgaaaaagcctggagagtcagtcaaggtctcctgcaaggctagcgggtataccttcacaaactatggaatgaactgggtgaggcaggctccaggacagggtttagagtggatgggctggataaacacctacactggagagccaacatatgctgatgacttcaagggacgggttaccatgtcttcggatacctctaccagcactgcctatttggaaatcaacagcctcagaagtgatgacacggctatatattactgtgcgcgctggagttggagtgatggttactacgtttactttgactactggggccaaggcactacggtcaccgtctcctcaggtggtggtggttctggcggcggcggctccggtggtggtggttctgacatcgtgatgacacagtctccagactccctgactgtgtctctgggcgagaggaccaccatcaactgcaagtccagccagagtgttttagacagctccaagaataagaactccttagcttggtaccagcagaaaccaggacagcctcctaaattactcctttcctgggcatctacgcgggaatccgggatccctgaccgattcagtggcagcgggtctgggacagatttcactctcactattgacagcctgcagcctgaagattctgcaacttactattgtcaacagtctgcccacttcccgatcacctttggccaagggacacgactggagattaaatccggaggtggtggctccgaggtgcagctggtcgagtctggaggaggattggtgcagcctggagggtcattgaaactctcatgtgcagcctctggattcaccttcaataagtacgccatgaactgggtccgccaggctccaggaaagggtttggaatgggttgctcgcataagaagtaaatataataattatgcaacatattatgccgattcagtgaaagacaggttcaccatctccagagatgattcaaaaaacactgcctatctacaaatgaacaacttgaaaactgaggacactgccgtgtactactgtgtgagacatgggaacttcggtaatagctacatatcctactgggcttactggggccaagggactctggtcaccgtctcctcaggtggtggtggttctggcggcggcggctccggtggtggtggttctcagactgttgtgactcaggaaccttcactcaccgtatcacctggtggaacagtcacactcacttgtggctcctcgactggggctgttacatctggctactacccaaactgggtccaacaaaaaccaggtcaggcaccccgtggtctaataggtgggactaagttcctcgcccccggtactcctgccagattctcaggctccctgcttggaggcaaggctgccctcaccctctcaggggtacagccagaggatgaggcagaatattactgtgctctatggtacagcaaccgctgggtgttcggtggaggaaccaaactgactgtccta

SEQ ID NO: 259 - protein, 505 aa, Artificial Sequence
  CD33 AH3 HL x F12Q HL
QVQLVQSGAEVKKPGESVKVSCKASGYTFTNYGMNWVRQAPGQGLEWMGWINTYTGEPTYADDFKGRVTMSSDTSTSTAYLEINSLRSDDTAIYYCARWSWSDGYYVYFDYWGQGTTVTVSSGGGGSGGGGSGGGGSDIVMTQSPDSLTVSLGERTTINCKSSQSVLDSSKNKNSLAWYQQKPGQPPKLLLSWASTRESGIPDRFSGSGSGTDFTLTIDSLQPEDSATYYCQQSAHFPITFGQGTRLEIKSGGGGSEVQLVESGGGLVQPGGSLKLSCAASGFTFNSYAMNWVRQAPGKGLEWVARIRSKYNNYATYYADSVKGRFTISRDDSKNTAYLQMNNLKTEDTAVYYCVRHGNFGNSYVSWWAYWGQGTLVTVSSGGGGSGGGGSGGGGSQTVVTQEPSLTVSPGGTVTLTCGSSTGAVTSGNYPNWVQQKPGQAPRGLIGGTKFLAPGTPARFSGSLLGGKAALTLSGVQPEDEAEYYCVLWYSNRWVFGGGTKLTVL

SEQ ID NO: 260 - DNA, 1515 bp, Artificial Sequence
  CD33 AH3 HL x F12Q HL
caggtgcagctggtgcagtctggagctgaggtgaaaaagcctggagagtcagtcaaggtctcctgcaaggctagcgggtataccttcacaaactatggaatgaactgggtgaggcaggctccaggacagggtttagagtggatgggctggataaacacctacactggagagccaacatatgctgatgacttcaagggacgggttaccatgtcttcggatacctctaccagcactgcctatttggaaatcaacagcctcagaagtgatgacacggctatatattactgtgcgcgctggagttggagtgatggttactacgtttactttgactactggggccaaggcactacggtcaccgtctcctcaggtggtggtggttctggcggcggcggctccggtggtggtggttctgacatcgtgatgacacagtctccagactccctgactgtgtctctgggcgagaggaccaccatcaactgcaagtccagccagagtgttttagacagctccaagaataagaactccttagcttggtaccagcagaaaccaggacagcctcctaaattactcctttcctgggcatctacgcgggaatccgggatccctgaccgattcagtggcagcgggtctgggacagatttcactctcactattgacagcctgcagcctgaagattctgcaacttactattgtcaacagtctgcccacttcccgatcacctttggccaagggacacgactggagattaaatccggaggtggtggctccgaggtgcagctggtcgagtctggaggaggattggtgcagcctggagggtcattgaaactctcatgtgcagcctctggattcaccttcaatagctacgccatgaactgggtccgccaggctccaggaaagggtttggaatgggttgctcgcataagaagtaaatataataattatgcaacatattatgccgattcagtgaaaggcaggttcaccatctccagagatgattcaaaaaacactgcctatctacaaatgaacaacttgaaaactgaggacactgccgtgtactactgtgtgagacatgggaacttcggtaatagctacgtttcctggtgggcttactggggccaagggactctggtcaccgtctcctcaggtggtggtggttctggcggcggcggctccggtggtggtggttctcagactgttgtgactcaggaaccttcactcaccgtatcacctggtggaacagtcacactcacttgtggctcctcgactggggctgttacatctggcaactacccaaactgggtccaacaaaaaccaggtcaggcaccccgtggtctaataggtgggactaagttcctcgcccccggtactcctgccagattctcaggctccctgcttggaggcaaggctgccctcaccctctcaggggtacagccagaggatgaggcagaatattactgtgttctatggtacagcaaccgctgggtgttcggtggaggaaccaaactgactgtccta

SEQ ID NO: 261 - protein, 505 aa, Artificial Sequence
  CD33 AH3 HL x I2C HL
QVQLVQSGAEVKKPGESVKVSCKASGYTFTNYGMNWVRQAPGQGLEWMGWINTYTGEPTYADDFKGRVTMSSDTSTSTAYLEINSLRSDDTAIYYCARWSWSDGYYVYFDYWGQGTTVTVSSGGGGSGGGGSGGGGSDIVMTQSPDSLTVSLGERTTINCKSSQSVLDSSKNKNSLAWYQQKPGQPPKLLLSWASTRESGIPDRFSGSGSGTDFTLTIDSLQPEDSATYYCQQSAHFPITFGQGTRLEIKSGGGGSEVQLVESGGGLVQPGGSLKLSCAASGFTFNKYAMNWVRQAPGKGLEWVARIRSKYNNYATYYADSVKDRFTISRDDSKNTAYLQMNNLKTEDTAVYYCVRHGNFGNSYISYWAYWGQGTLVTVSSGGGGSGGGGSGGGGSQTVVTQEPSLTVSPGGTVTLTCGSSTGAVTSGNYPNWVQQKPGQAPRGLIGGTKFLAPGTPARFSGSLLGGKAALTLSGVQPEDEAEYYCVLWYSNRWVFGGGTKLTVL

SEQ ID NO: 262 - DNA, 1515 bp, Artificial Sequence
  CD33 AH3 HL x I2C HL
caggtgcagctggtgcagtctggagctgaggtgaaaaagcctggagagtcagtcaaggtctcctgcaaggctagcgggtataccttcacaaactatggaatgaactgggtgaggcaggctccaggacagggtttagagtggatgggctggataaacacctacactggagagccaacatatgctgatgacttcaagggacgggttaccatgtcttcggatacctctaccagcactgcctatttggaaatcaacagcctcagaagtgatgacacggctatatattactgtgcgcgctggagttggagtgatggttactacgtttactttgactactggggccaaggcactacggtcaccgtctcctcaggtggtggtggttctggcggcggcggctccggtggtggtggttctgacatcgtgatgacacagtctccagactccctgactgtgtctctgggcgagaggaccaccatcaactgcaagtccagccagagtgttttagacagctccaagaataagaactccttagcttggtaccagcagaaaccaggacagcctcctaaattactcctttcctgggcatctacgcgggaatccgggatccctgaccgattcagtggcagcgggtctgggacagatttcactctcactattgacagcctgcagcctgaagattctgcaacttactattgtcaacagtctgcccacttcccgatcacctttggccaagggacacgactggagattaaatccggaggtggtggctccgaggtgcagctggtcgagtctggaggaggattggtgcagcctggagggtcattgaaactctcatgtgcagcctctggattcaccttcaataagtacgccatgaactgggtccgccaggctccaggaaagggtttggaatgggttgctcgcataagaagtaaatataataattatgcaacatattatgccgattcagtgaaagacaggttcaccatctccagagatgattcaaaaaacactgcctatctacaaatgaacaacttgaaaactgaggacactgccgtgtactactgtgtgagacatgggaacttcggtaatagctacatatcctactgggcttactggggccaagggactctggtcaccgtctcctcaggtggtggtggttctggcggcggcggctccggtggtggtggttctcagactgttgtgactcaggaaccttcactcaccgtatcacctggtggaacagtcacactcacttgtggctcctcgactggggctgttacatctggcaactacccaaactgggtccaacaaaaaccaggtcaggcaccccgtggtctaataggtgggactaagttcctcgcccccggtactcctgccagattctcaggctccctgcttggaggcaaggctgccctcaccctctcaggggtacagccagaggatgaggcagaatattactgtgttctatggtacagcaaccgctgggtgttcggtggaggaaccaaactgactgtccta

SEQ ID NO: 263 - protein, 505 aa, Artificial Sequence
  CD33 AF5 HL x H2C HL
QVQLVQSGAEVKKPGASVKVSCKASGYTFTNYGMNWVKQAPGQGLKWMGWINTYTGEPTYADDFKGRVTMTSDTSTSTAYLELHNLRSDDTAVYYCARWSWSDGYYVYFDYWGQGTTVTVSSGGGGSGGGGSGGGGSDIVMTQSPDSLTVSLGERTTINCKSSQSVLDSSKNKNSLAWYQQKPGQPPKLLLSWASTRESGIPDRFSGSGSGTDFTLTIDSLQPEDSATYYCQQSAHFPITFGQGTRLEIKSGGGGSEVQLVESGGGLVQPGGSLKLSCAASGFTFNKYAMNWVRQAPGKGLEWVARIRSKYNNYATYYADSVKDRFTISRDDSKNTAYLQMNNLKTEDTAVYYCVRHGNFGNSYISYWAYWGQGTLVTVSSGGGGSGGGGSGGGGSQTVVTQEPSLTVSPGGTVTLTCGSSTGAVTSGYYPNWVQQKPGQAPRGLIGGTKFLAPGTPARFSGSLLGGKAALTLSGVQPEDEAEYYCALWYSNRWVFGGGTKLTVL

SEQ ID NO: 264 - DNA, 1515 bp, Artificial Sequence
  CD33 AF5 HL x H2C HL
caggtgcagctggtgcagtctggagctgaggtgaagaagcctggagcgtcagtcaaggtctcctgcaaggctagcgggtataccttcacaaactatggaatgaactgggtgaagcaggctccaggacagggtttaaagtggatgggctggataaacacctacactggagagccaacatatgctgatgacttcaagggacgggttaccatgacttcggatacctctaccagcactgcctatttggaactccacaacctcagaagtgatgacacggctgtatattactgtgcgcgctggagttggagtgatggttactacgtttactttgactactggggccaaggcactacggtcaccgtctcctcaggtggtggtggttctggcggcggcggctccggtggtggtggttctgacatcgtgatgacacagtctccagactccctgactgtgtctctgggcgagaggaccaccatcaactgcaagtccagccagagtgttttagacagctccaagaataagaactccttagcttggtaccagcagaaaccaggacagcctcctaaattactcctttcctgggcatctacgcgggaatccgggatccctgaccgattcagtggcagcgggtctgggacagatttcactctcactattgacagcctgcagcctgaagattctgcaacttactattgtcaacagtctgcccacttcccgatcacctttggccaagggacacgactggagattaaatccggaggtggtggctccgaggtgcagctggtcgagtctggaggaggattggtgcagcctggagggtcattgaaactctcatgtgcagcctctggattcaccttcaataagtacgccatgaactgggtccgccaggctccaggaaagggtttggaatgggttgctcgcataagaagtaaatataataattatgcaacatattatgccgattcagtgaaagacaggttcaccatctccagagatgattcaaaaaacactgcctatctacaaatgaacaacttgaaaactgaggacactgccgtgtactactgtgtgagacatgggaacttcggtaatagctacatatcctactgggcttactggggccaagggactctggtcaccgtctcctcaggtggtggtggttctggcggcggcggctccggtggtggtggttctcagactgttgtgactcaggaaccttcactcaccgtatcacctggtggaacagtcacactcacttgtggctcctcgactggggctgttacatctggctactacccaaactgggtccaacaaaaaccaggtcaggcaccccgtggtctaataggtgggactaagttcctcgcccccggtactcctgccagattctcaggctccctgcttggaggcaaggctgccctcaccctctcaggggtacagccagaggatgaggcagaatattactgtgctctatggtacagcaaccgctgggtgttcggtggaggaaccaaactgactgtccta

SEQ ID NO: 265 - protein, 505 aa, Artificial Sequence
  CD33 AF5 HL x F12Q HL
QVQLVQSGAEVKKPGASVKVSCKASGYTFTNYGMNWVKQAPGQGLKWMGWINTYTGEPTYADDFKGRVTMTSDTSTSTAYLELHNLRSDDTAVYYCARWSWSDGYYVYFDYWGQGTTVTVSSGGGGSGGGGSGGGGSDIVMTQSPDSLTVSLGERTTINCKSSQSVLDSSKNKNSLAWYQQKPGQPPKLLLSWASTRESGIPDRFSGSGSGTDFTLTIDSLQPEDSATYYCQQSAHFPITFGQGTRLEIKSGGGGSEVQLVESGGGLVQPGGSLKLSCAASGFTFNSYAMNWVRQAPGKGLEWVARIRSKYNNYATYYADSVKGRFTISRDDSKNTAYLQMNNLKTEDTAVYYCVRHGNFGNSYVSWWAYWGQGTLVTVSSGGGGSGGGGSGGGGSQTVVTQEPSLTVSPGGTVTLTCGSSTGAVTSGNYPNWVQQKPGQAPRGLIGGTKFLAPGTPARFSGSLLGGKAALTLSGVQPEDEAEYYCVLWYSNRWVFGGGTKLTVL

SEQ ID NO: 266 - DNA, 1515 bp, Artificial Sequence
  CD33 AF5 HL x F12Q HL
caggtgcagctggtgcagtctggagctgaggtgaagaagcctggagcgtcagtcaaggtctcctgcaaggctagcgggtataccttcacaaactatggaatgaactgggtgaagcaggctccaggacagggtttaaagtggatgggctggataaacacctacactggagagccaacatatgctgatgacttcaagggacgggttaccatgacttcggatacctctaccagcactgcctatttggaactccacaacctcagaagtgatgacacggctgtatattactgtgcgcgctggagttggagtgatggttactacgtttactttgactactggggccaaggcactacggtcaccgtctcctcaggtggtggtggttctggcggcggcggctccggtggtggtggttctgacatcgtgatgacacagtctccagactccctgactgtgtctctgggcgagaggaccaccatcaactgcaagtccagccagagtgttttagacagctccaagaataagaactccttagcttggtaccagcagaaaccaggacagcctcctaaattactcctttcctgggcatctacgcgggaatccgggatccctgaccgattcagtggcagcgggtctgggacagatttcactctcactattgacagcctgcagcctgaagattctgcaacttactattgtcaacagtctgcccacttcccgatcacctttggccaagggacacgactggagattaaatccggaggtggtggctccgaggtgcagctggtcgagtctggaggaggattggtgcagcctggagggtcattgaaactctcatgtgcagcctctggattcaccttcaatagctacgccatgaactgggtccgccaggctccaggaaagggtttggaatgggttgctcgcataagaagtaaatataataattatgcaacatattatgccgattcagtgaaaggcaggttcaccatctccagagatgattcaaaaaacactgcctatctacaaatgaacaacttgaaaactgaggacactgccgtgtactactgtgtgagacatgggaacttcggtaatagctacgtttcctggtgggcttactggggccaagggactctggtcaccgtctcctcaggtggtggtggttctggcggcggcggctccggtggtggtggttctcagactgttgtgactcaggaaccttcactcaccgtatcacctggtggaacagtcacactcacttgtggctcctcgactggggctgttacatctggcaactacccaaactgggtccaacaaaaaccaggtcaggcaccccgtggtctaataggtgggactaagttcctcgcccccggtactcctgccagattctcaggctccctgcttggaggcaaggctgccctcaccctctcaggggtacagccagaggatgaggcagaatattactgtgttctatggtacagcaaccgctgggtgttcggtggaggaaccaaactgactgtccta

SEQ ID NO: 267 - protein, 505 aa, Artificial Sequence
  CD33 AF5 HL x I2C HL
QVQLVQSGAEVKKPGASVKVSCKASGYTFTNYGMNWVKQAPGQGLKWMGWINTYTGEPTYADDFKGRVTMTSDTSTSTAYLELHNLRSDDTAVYYCARWSWSDGYYVYFDYWGQGTTVTVSSGGGGSGGGGSGGGGSDIVMTQSPDSLTVSLGERTTINCKSSQSVLDSSKNKNSLAWYQQKPGQPPKLLLSWASTRESGIPDRFSGSGSGTDFTLTIDSLQPEDSATYYCQQSAHFPITFGQGTRLEIKSGGGGSEVQLVESGGGLVQPGGSLKLSCAASGFTFNKYAMNWVRQAPGKGLEWVARIRSKYNNYATYYADSVKDRFTISRDDSKNTAYLQMNNLKTEDTAVYYCVRHGNFGNSYISYWAYWGQGTLVTVSSGGGGSGGGGSGGGGSQTVVTQEPSLTVSPGGTVTLTCGSSTGAVTSGNYPNWVQQKPGQAPRGLIGGTKFLAPGTPARFSGSLLGGKAALTLSGVQPEDEAEYYCVLWYSNRWVFGGGTKLTVL

SEQ ID NO: 268 - DNA, 1515 bp, Artificial Sequence
  CD33 AF5 HL x I2C HL
caggtgcagctggtgcagtctggagctgaggtgaagaagcctggagcgtcagtcaaggtctcctgcaaggctagcgggtataccttcacaaactatggaatgaactgggtgaagcaggctccaggacagggtttaaagtggatgggctggataaacacctacactggagagccaacatatgctgatgacttcaagggacgggttaccatgacttcggatacctctaccagcactgcctatttggaactccacaacctcagaagtgatgacacggctgtatattactgtgcgcgctggagttggagtgatggttactacgtttactttgactactggggccaaggcactacggtcaccgtctcctcaggtggtggtggttctggcggcggcggctccggtggtggtggttctgacatcgtgatgacacagtctccagactccctgactgtgtctctgggcgagaggaccaccatcaactgcaagtccagccagagtgttttagacagctccaagaataagaactccttagcttggtaccagcagaaaccaggacagcctcctaaattactcctttcctgggcatctacgcgggaatccgggatccctgaccgattcagtggcagcgggtctgggacagatttcactctcactattgacagcctgcagcctgaagattctgcaacttactattgtcaacagtctgcccacttcccgatcacctttggccaagggacacgactggagattaaatccggaggtggtggctccgaggtgcagctggtcgagtctggaggaggattggtgcagcctggagggtcattgaaactctcatgtgcagcctctggattcaccttcaataagtacgccatgaactgggtccgccaggctccaggaaagggtttggaatgggttgctcgcataagaagtaaatataataattatgcaacatattatgccgattcagtgaaagacaggttcaccatctccagagatgattcaaaaaacactgcctatctacaaatgaacaacttgaaaactgaggacactgccgtgtactactgtgtgagacatgggaacttcggtaatagctacatatcctactgggcttactggggccaagggactctggtcaccgtctcctcaggtggtggtggttctggcggcggcggctccggtggtggtggttctcagactgttgtgactcaggaaccttcactcaccgtatcacctggtggaacagtcacactcacttgtggctcctcgactggggctgttacatctggcaactacccaaactgggtccaacaaaaaccaggtcaggcaccccgtggtctaataggtgggactaagttcctcgcccccggtactcctgccagattctcaggctccctgcttggaggcaaggctgccctcaccctctcaggggtacagccagaggatgaggcagaatattactgtgttctatggtacagcaaccgctgggtgttcggtggaggaaccaaactgactgtccta

SEQ ID NO: 269 - protein, 505 aa, Artificial Sequence
  CD33 AC8 HL x H2C HL
QVQLVQSGAEVKKPGESVKVSCKASGYTFTNYGMNWVKQAPGQGLKWMGWINTYTGEPTYADDFKGRVTMTTDTSTSTAYMEIRNLRNDDTAVYYCARWSWSDGYYVYFDYWGQGTTVTVSSGGGGSGGGGSGGGGSDIVMTQSPDSLTVSLGERTTINCKSSQSVLDSSKNKNSLAWYQQKPGQPPKLLLSWASTRESGIPDRFSGSGSGTDFTLTIDSLQPEDSATYYCQQSAHFPITFGQGTRLEIKSGGGGSEVQLVESGGGLVQPGGSLKLSCAASGFTFNKYAMNWVRQAPGKGLEWVARIRSKYNNYATYYADSVKDRFTISRDDSKNTAYLQMNNLKTEDTAVYYCVRHGNFGNSYISYWAYWGQGTLVTVSSGGGGSGGGGSGGGGSQTVVTQEPSLTVSPGGTVTLTCGSSTGAVTSGYYPNWVQQKPGQAPRGLIGGTKFLAPGTPARFSGSLLGGKAALTLSGVQPEDEAEYYCALWYSNRWVFGGGTKLTVL

SEQ ID NO: 270 - DNA, 1515 bp, Artificial Sequence
  CD33 AC8 HL x H2C HL
caggtgcagctggtgcagtctggagctgaggtgaagaagcctggagagtcagtcaaggtctcctgcaaggctagcgggtataccttcacaaactatggaatgaactgggtgaagcaggctccaggacagggtttaaagtggatgggctggataaacacctacactggagagccaacatatgctgatgacttcaagggacgggttaccatgactacggatacctctaccagcactgcctatatggaaatccgcaacctcagaaatgatgacacggctgtatattactgtgcgcgctggagttggagtgatggttactacgtttactttgactactggggccaaggcactacggtcaccgtctcctcaggtggtggtggttctggcggcggcggctccggtggtggtggttctgacatcgtgatgacacagtctccagactccctgactgtgtctctgggcgagaggaccaccatcaactgcaagtccagccagagtgttttagacagctccaagaataagaactccttagcttggtaccagcagaaaccaggacagcctcctaaattactcctttcctgggcatctacgcgggaatccgggatccctgaccgattcagtggcagcgggtctgggacagatttcactctcactattgacagcctgcagcctgaagattctgcaacttactattgtcaacagtctgcccacttcccgatcacctttggccaagggacacgactggagattaaatccggaggtggtggctccgaggtgcagctggtcgagtctggaggaggattggtgcagcctggagggtcattgaaactctcatgtgcagcctctggattcaccttcaataagtacgccatgaactgggtccgccaggctccaggaaagggtttggaatgggttgctcgcataagaagtaaatataataattatgcaacatattatgccgattcagtgaaagacaggttcaccatctccagagatgattcaaaaaacactgcctatctacaaatgaacaacttgaaaactgaggacactgccgtgtactactgtgtgagacatgggaacttcggtaatagctacatatcctactgggcttactggggccaagggactctggtcaccgtctcctcaggtggtggtggttctggcggcggcggctccggtggtggtggttctcagactgttgtgactcaggaaccttcactcaccgtatcacctggtggaacagtcacactcacttgtggctcctcgactggggctgttacatctggctactacccaaactgggtccaacaaaaaccaggtcaggcaccccgtggtctaataggtgggactaagttcctcgcccccggtactcctgccagattctcaggctccctgcttggaggcaaggctgccctcaccctctcaggggtacagccagaggatgaggcagaatattactgtgctctatggtacagcaaccgctgggtgttcggtggaggaaccaaactgactgtccta

SEQ ID NO: 271 - protein, 505 aa, Artificial Sequence
  CD33 AC8 HL x F12Q HL
QVQLVQSGAEVKKPGESVKVSCKASGYTFTNYGMNWVKQAPGQGLKWMGWINTYTGEPTYADDFKGRVTMTTDTSTSTAYMEIRNLRNDDTAVYYCARWSWSDGYYVYFDYWGQGTTVTVSSGGGGSGGGGSGGGGSDIVMTQSPDSLTVSLGERTTINCKSSQSVLDSSKNKNSLAWYQQKPGQPPKLLLSWASTRESGIPDRFSGSGSGTDFTLTIDSLQPEDSATYYCQQSAHFPITFGQGTRLEIKSGGGGSEVQLVESGGGLVQPGGSLKLSCAASGFTFNSYAMNWVRQAPGKGLEWVARIRSKYNNYATYYADSVKGRFTISRDDSKNTAYLQMNNLKTEDTAVYYCVRHGNFGNSYVSWWAYWGQGTLVTVSSGGGGSGGGGSGGGGSQTVVTQEPSLTVSPGGTVTLTCGSSTGAVTSGNYPNWVQQKPGQAPRGLIGGTKFLAPGTPARFSGSLLGGKAALTLSGVQPEDEAEYYCVLWYSNRWVFGGGTKLTVL

SEQ ID NO: 272 - DNA, 1515 bp, Artificial Sequence
  CD33 AC8 HL x F12Q HL
caggtgcagctggtgcagtctggagctgaggtgaagaagcctggagagtcagtcaaggtctcctgcaaggctagcgggtataccttcacaaactatggaatgaactgggtgaagcaggctccaggacagggtttaaagtggatgggctggataaacacctacactggagagccaacatatgctgatgacttcaagggacgggttaccatgactacggatacctctaccagcactgcctatatggaaatccgcaacctcagaaatgatgacacggctgtatattactgtgcgcgctggagttggagtgatggttactacgtttactttgactactggggccaaggcactacggtcaccgtctcctcaggtggtggtggttctggcggcggcggctccggtggtggtggttctgacatcgtgatgacacagtctccagactccctgactgtgtctctgggcgagaggaccaccatcaactgcaagtccagccagagtgttttagacagctccaagaataagaactccttagcttggtaccagcagaaaccaggacagcctcctaaattactcctttcctgggcatctacgcgggaatccgggatccctgaccgattcagtggcagcgggtctgggacagatttcactctcactattgacagcctgcagcctgaagattctgcaacttactattgtcaacagtctgcccacttcccgatcacctttggccaagggacacgactggagattaaatccggaggtggtggctccgaggtgcagctggtcgagtctggaggaggattggtgcagcctggagggtcattgaaactctcatgtgcagcctctggattcaccttcaatagctacgccatgaactgggtccgccaggctccaggaaagggtttggaatgggttgctcgcataagaagtaaatataataattatgcaacatattatgccgattcagtgaaaggcaggttcaccatctccagagatgattcaaaaaacactgcctatctacaaatgaacaacttgaaaactgaggacactgccgtgtactactgtgtgagacatgggaacttcggtaatagctacgtttcctggtgggcttactggggccaagggactctggtcaccgtctcctcaggtggtggtggttctggcggcggcggctccggtggtggtggttctcagactgttgtgactcaggaaccttcactcaccgtatcacctggtggaacagtcacactcacttgtggctcctcgactggggctgttacatctggcaactacccaaactgggtccaacaaaaaccaggtcaggcaccccgtggtctaataggtgggactaagttcctcgcccccggtactcctgccagattctcaggctccctgcttggaggcaaggctgccctcaccctctcaggggtacagccagaggatgaggcagaatattactgtgttctatggtacagcaaccgctgggtgttcggtggaggaaccaaactgactgtccta

SEQ ID NO: 273 - protein, 505 aa, Artificial Sequence
  CD33 AC8 HL x I2C HL
QVQLVQSGAEVKKPGESVKVSCKASGYTFTNYGMNWVKQAPGQGLKWMGWINTYTGEPTYADDFKGRVTMTTDTSTSTAYMEIRNLRNDDTAVYYCARWSWSDGYYVYFDYWGQGTTVTVSSGGGGSGGGGSGGGGSDIVMTQSPDSLTVSLGERTTINCKSSQSVLDSSKNKNSLAWYQQKPGQPPKLLLSWASTRESGIPDRFSGSGSGTDFTLTIDSLQPEDSATYYCQQSAHFPITFGQGTRLEIKSGGGGSEVQLVESGGGLVQPGGSLKLSCAASGFTFNKYAMNWVRQAPGKGLEWVARIRSKYNNYATYYADSVKDRFTISRDDSKNTAYLQMNNLKTEDTAVYYCVRHGNFGNSYISYWAYWGQGTLVTVSSGGGGSGGGGSGGGGSQTVVTQEPSLTVSPGGTVTLTCGSSTGAVTSGNYPNWVQQKPGQAPRGLIGGTKFLAPGTPARFSGSLLGGKAALTLSGVQPEDEAEYYCVLWYSNRWVFGGGTKLTVL

SEQ ID NO: 274 - DNA, 1515 bp, Artificial Sequence
  CD33 AC8 HL x I2C HL
caggtgcagctggtgcagtctggagctgaggtgaagaagcctggagagtcagtcaaggtctcctgcaaggctagcgggtataccttcacaaactatggaatgaactgggtgaagcaggctccaggacagggtttaaagtggatgggctggataaacacctacactggagagccaacatatgctgatgacttcaagggacgggttaccatgactacggatacctctaccagcactgcctatatggaaatccgcaacctcagaaatgatgacacggctgtatattactgtgcgcgctggagttggagtgatggttactacgtttactttgactactggggccaaggcactacggtcaccgtctcctcaggtggtggtggttctggcggcggcggctccggtggtggtggttctgacatcgtgatgacacagtctccagactccctgactgtgtctctgggcgagaggaccaccatcaactgcaagtccagccagagtgttttagacagctccaagaataagaactccttagcttggtaccagcagaaaccaggacagcctcctaaattactcctttcctgggcatctacgcgggaatccgggatccctgaccgattcagtggcagcgggtctgggacagatttcactctcactattgacagcctgcagcctgaagattctgcaacttactattgtcaacagtctgcccacttcccgatcacctttggccaagggacacgactggagattaaatccggaggtggtggctccgaggtgcagctggtcgagtctggaggaggattggtgcagcctggagggtcattgaaactctcatgtgcagcctctggattcaccttcaataagtacgccatgaactgggtccgccaggctccaggaaagggtttggaatgggttgctcgcataagaagtaaatataataattatgcaacatattatgccgattcagtgaaagacaggttcaccatctccagagatgattcaaaaaacactgcctatctacaaatgaacaacttgaaaactgaggacactgccgtgtactactgtgtgagacatgggaacttcggtaatagctacatatcctactgggcttactggggccaagggactctggtcaccgtctcctcaggtggtggtggttctggcggcggcggctccggtggtggtggttctcagactgttgtgactcaggaaccttcactcaccgtatcacctggtggaacagtcacactcacttgtggctcctcgactggggctgttacatctggcaactacccaaactgggtccaacaaaaaccaggtcaggcaccccgtggtctaataggtgggactaagttcctcgcccccggtactcctgccagattctcaggctccctgcttggaggcaaggctgccctcaccctctcaggggtacagccagaggatgaggcagaatattactgtgttctatggtacagcaaccgctgggtgttcggtggaggaaccaaactgactgtccta

SEQ ID NO: 275 - protein, 505 aa, Artificial Sequence
  CD33 AH11 HL x H2C HL
QVQLVQSGAEVKKPGESVKVSCKASGYTFTNYGMNWVKQAPGQGLKWMGWINTYTGEPTYADDFKGRVTMTSDTSTSTAYMEISSLRSDDTAVYYCARWSWSDGYYVYFDYWGQGTTVTVSSGGGGSGGGGSGGGGSDIVMTQSPDSLTVSLGERTTINCKSSQSVLDSSKNKNSLAWYQQKPGQPPKLLLSWASTRESGIPDRFSGSGSGTDFTLTIDSLQPEDSATYYCQQSAHFPITFGQGTRLEIKSGGGGSEVQLVESGGGLVQPGGSLKLSCAASGFTFNKYAMNWVRQAPGKGLEWVARIRSKYNNYATYYADSVKDRFTISRDDSKNTAYLQMNNLKTEDTAVYYCVRHGNFGNSYISYWAYWGQGTLVTVSSGGGGSGGGGSGGGGSQTVVTQEPSLTVSPGGTVTLTCGSSTGAVTSGYYPNWVQQKPGQAPRGLIGGTKFLAPGTPARFSGSLLGGKAALTLSGVQPEDEAEYYCALWYSNRWVFGGGTKLTVL

SEQ ID NO: 276 - DNA, 1515 bp, Artificial Sequence
  CD33 AH11 HL x H2C HL
caggtgcagctggtgcagtctggagctgaggtgaagaagcctggagagtcagtcaaggtctcctgcaaggctagcgggtataccttcacaaactatggaatgaactgggtgaagcaggctccaggacagggtttaaagtggatgggctggataaacacctacactggagagccaacatatgctgatgacttcaagggacgggttaccatgacttcggatacctctaccagcactgcctatatggaaatcagcagcctcagaagtgatgacacggctgtatattactgtgcgcgctggagttggagtgatggttactacgtttactttgactactggggccaaggcactacggtcaccgtctcctcaggtggtggtggttctggcggcggcggctccggtggtggtggttctgacatcgtgatgacacagtctccagactccctgactgtgtctctgggcgagaggaccaccatcaactgcaagtccagccagagtgttttagacagctccaagaataagaactccttagcttggtaccagcagaaaccaggacagcctcctaaattactcctttcctgggcatctacgcgggaatccgggatccctgaccgattcagtggcagcgggtctgggacagatttcactctcactattgacagcctgcagcctgaagattctgcaacttactattgtcaacagtctgcccacttcccgatcacctttggccaagggacacgactggagattaaatccggaggtggtggctccgaggtgcagctggtcgagtctggaggaggattggtgcagcctggagggtcattgaaactctcatgtgcagcctctggattcaccttcaataagtacgccatgaactgggtccgccaggctccaggaaagggtttggaatgggttgctcgcataagaagtaaatataataattatgcaacatattatgccgattcagtgaaagacaggttcaccatctccagagatgattcaaaaaacactgcctatctacaaatgaacaacttgaaaactgaggacactgccgtgtactactgtgtgagacatgggaacttcggtaatagctacatatcctactgggcttactggggccaagggactctggtcaccgtctcctcaggtggtggtggttctggcggcggcggctccggtggtggtggttctcagactgttgtgactcaggaaccttcactcaccgtatcacctggtggaacagtcacactcacttgtggctcctcgactggggctgttacatctggctactacccaaactgggtccaacaaaaaccaggtcaggcaccccgtggtctaataggtgggactaagttcctcgcccccggtactcctgccagattctcaggctccctgcttggaggcaaggctgccctcaccctctcaggggtacagccagaggatgaggcagaatattactgtgctctatggtacagcaaccgctgggtgttcggtggaggaaccaaactgactgtccta

SEQ ID NO: 277 - protein, 505 aa, Artificial Sequence
  CD33 AH11 HL x F12Q HL
QVQLVQSGAEVKKPGESVKVSCKASGYTFTNYGMNWVKQAPGQGLKWMGWINTYTGEPTYADDFKGRVTMTSDTSTSTAYMEISSLRSDDTAVYYCARWSWSDGYYVYFDYWGQGTTVTVSSGGGGSGGGGSGGGGSDIVMTQSPDSLTVSLGERTTINCKSSQSVLDSSKNKNSLAWYQQKPGQPPKLLLSWASTRESGIPDRFSGSGSGTDFTLTIDSLQPEDSATYYCQQSAHFPITFGQGTRLEIKSGGGGSEVQLVESGGGLVQPGGSLKLSCAASGFTFNSYAMNWVRQAPGKGLEWVARIRSKYNNYATYYADSVKGRFTISRDDSKNTAYLQMNNLKTEDTAVYYCVRHGNFGNSYVSWWAYWGQGTLVTVSSGGGGSGGGGSGGGGSQTVVTQEPSLTVSPGGTVTLTCGSSTGAVTSGNYPNWVQQKPGQAPRGLIGGTKFLAPGTPARFSGSLLGGKAALTLSGVQPEDEAEYYCVLWYSNRWVFGGGTKLTVL

SEQ ID NO: 278 - DNA, 1515 bp, Artificial Sequence
  CD33 AH11 HL x F12Q HL
caggtgcagctggtgcagtctggagctgaggtgaagaagcctggagagtcagtcaaggtctcctgcaaggctagcgggtataccttcacaaactatggaatgaactgggtgaagcaggctccaggacagggtttaaagtggatgggctggataaacacctacactggagagccaacatatgctgatgacttcaagggacgggttaccatgacttcggatacctctaccagcactgcctatatggaaatcagcagcctcagaagtgatgacacggctgtatattactgtgcgcgctggagttggagtgatggttactacgtttactttgactactggggccaaggcactacggtcaccgtctcctcaggtggtggtggttctggcggcggcggctccggtggtggtggttctgacatcgtgatgacacagtctccagactccctgactgtgtctctgggcgagaggaccaccatcaactgcaagtccagccagagtgttttagacagctccaagaataagaactccttagcttggtaccagcagaaaccaggacagcctcctaaattactcctttcctgggcatctacgcgggaatccgggatccctgaccgattcagtggcagcgggtctgggacagatttcactctcactattgacagcctgcagcctgaagattctgcaacttactattgtcaacagtctgcccacttcccgatcacctttggccaagggacacgactggagattaaatccggaggtggtggctccgaggtgcagctggtcgagtctggaggaggattggtgcagcctggagggtcattgaaactctcatgtgcagcctctggattcaccttcaatagctacgccatgaactgggtccgccaggctccaggaaagggtttggaatgggttgctcgcataagaagtaaatataataattatgcaacatattatgccgattcagtgaaaggcaggttcaccatctccagagatgattcaaaaaacactgcctatctacaaatgaacaacttgaaaactgaggacactgccgtgtactactgtgtgagacatgggaacttcggtaatagctacgtttcctggtgggcttactggggccaagggactctggtcaccgtctcctcaggtggtggtggttctggcggcggcggctccggtggtggtggttctcagactgttgtgactcaggaaccttcactcaccgtatcacctggtggaacagtcacactcacttgtggctcctcgactggggctgttacatctggcaactacccaaactgggtccaacaaaaaccaggtcaggcaccccgtggtctaataggtgggactaagttcctcgcccccggtactcctgccagattctcaggctccctgcttggaggcaaggctgccctcaccctctcaggggtacagccagaggatgaggcagaatattactgtgttctatggtacagcaaccgctgggtgttcggtggaggaaccaaactgactgtccta

SEQ ID NO: 279 - protein, 505 aa, Artificial Sequence
  CD33 AH11 HL x I2C HL
QVQLVQSGAEVKKPGESVKVSCKASGYTFTNYGMNWVKQAPGQGLKWMGWINTYTGEPTYADDFKGRVTMTSDTSTSTAYMEISSLRSDDTAVYYCARWSWSDGYYVYFDYWGQGTTVTVSSGGGGSGGGGSGGGGSDIVMTQSPDSLTVSLGERTTINCKSSQSVLDSSKNKNSLAWYQQKPGQPPKLLLSWASTRESGIPDRFSGSGSGTDFTLTIDSLQPEDSATYYCQQSAHFPITFGQGTRLEIKSGGGGSEVQLVESGGGLVQPGGSLKLSCAASGFTFNKYAMNWVRQAPGKGLEWVARIRSKYNNYATYYADSVKDRFTISRDDSKNTAYLQMNNLKTEDTAVYYCVRHGNFGNSYISYWAYWGQGTLVTVSSGGGGSGGGGSGGGGSQTVVTQEPSLTVSPGGTVTLTCGSSTGAVTSGNYPNWVQQKPGQAPRGLIGGTKFLAPGTPARFSGSLLGGKAALTLSGVQPEDEAEYYCVLWYSNRWVFGGGTKLTVL

SEQ ID NO: 280 - DNA, 1515 bp, Artificial Sequence
  CD33 AH11 HL x I2C HL
caggtgcagctggtgcagtctggagctgaggtgaagaagcctggagagtcagtcaaggtctcctgcaaggctagcgggtataccttcacaaactatggaatgaactgggtgaagcaggctccaggacagggtttaaagtggatgggctggataaacacctacactggagagccaacatatgctgatgacttcaagggacgggttaccatgacttcggatacctctaccagcactgcctatatggaaatcagcagcctcagaagtgatgacacggctgtatattactgtgcgcgctggagttggagtgatggttactacgtttactttgactactggggccaaggcactacggtcaccgtctcctcaggtggtggtggttctggcggcggcggctccggtggtggtggttctgacatcgtgatgacacagtctccagactccctgactgtgtctctgggcgagaggaccaccatcaactgcaagtccagccagagtgttttagacagctccaagaataagaactccttagcttggtaccagcagaaaccaggacagcctcctaaattactcctttcctgggcatctacgcgggaatccgggatccctgaccgattcagtggcagcgggtctgggacagatttcactctcactattgacagcctgcagcctgaagattctgcaacttactattgtcaacagtctgcccacttcccgatcacctttggccaagggacacgactggagattaaatccggaggtggtggctccgaggtgcagctggtcgagtctggaggaggattggtgcagcctggagggtcattgaaactctcatgtgcagcctctggattcaccttcaataagtacgccatgaactgggtccgccaggctccaggaaagggtttggaatgggttgctcgcataagaagtaaatataataattatgcaacatattatgccgattcagtgaaagacaggttcaccatctccagagatgattcaaaaaacactgcctatctacaaatgaacaacttgaaaactgaggacactgccgtgtactactgtgtgagacatgggaacttcggtaatagctacatatcctactgggcttactggggccaagggactctggtcaccgtctcctcaggtggtggtggttctggcggcggcggctccggtggtggtggttctcagactgttgtgactcaggaaccttcactcaccgtatcacctggtggaacagtcacactcacttgtggctcctcgactggggctgttacatctggcaactacccaaactgggtccaacaaaaaccaggtcaggcaccccgtggtctaataggtgggactaagttcctcgcccccggtactcctgccagattctcaggctccctgcttggaggcaaggctgccctcaccctctcaggggtacagccagaggatgaggcagaatattactgtgttctatggtacagcaaccgctgggtgttcggtggaggaaccaaactgactgtccta

SEQ ID NO: 281 - protein, 505 aa, Artificial Sequence
  CD33 B3 HL x H2C HL
QVQLVQSGAEVKKPGESVKVSCKASGYTFTNYGMNWVKQAPGQGLEWMGWINTYTGETNYADKFQGRVTFTSDTSTSTAYMELRNLKSDDTAVYYCARWSWSDGYYVYFDYWGQGTTVTVSSGGGGSGGGGSGGGGSDIVMTQSPDSMTVSLGERTTINCKSSQSVLDSSTNKNSLAWYQQKPGQPPKLLLSWASTRESGIPDRFSGSGSGTDFTLTIDSLQPEDSATYYCQQSAHFPITFGQGTRLDIKSGGGGSEVQLVESGGGLVQPGGSLKLSCAASGFTFNKYAMNWVRQAPGKGLEWVARIRSKYNNYATYYADSVKDRFTISRDDSKNTAYLQMNNLKTEDTAVYYCVRHGNFGNSYISYWAYWGQGTLVTVSSGGGGSGGGGSGGGGSQTVVTQEPSLTVSPGGTVTLTCGSSTGAVTSGYYPNWVQQKPGQAPRGLIGGTKFLAPGTPARFSGSLLGGKAALTLSGVQPEDEAEYYCALWYSNRWVFGGGTKLTVL

SEQ ID NO: 282 - DNA, 1515 bp, Artificial Sequence
  CD33 B3 HL x H2C HL
caggtgcagctggtgcagtctggagctgaggtgaagaagcctggagagtcagtcaaggtctcctgcaaggctagcgggtataccttcacaaactatggaatgaactgggtgaagcaggctccaggacagggtttagagtggatgggctggataaacacctacactggagagacaaactatgctgataagttccagggacgcgttaccttcacttcggatacctctaccagcactgcctatatggaactccgcaacctcaaaagtgatgacacggctgtatattactgtgcgcgctggagttggagtgatggttactacgtttactttgactactggggccaaggcactacggtcaccgtctcctcaggtggtggtggttctggcggcggcggctccggtggtggtggttctgacatcgtgatgacacagtctccagactccatgactgtgtctctgggcgagaggaccaccatcaactgcaagtccagccagagtgttttagacagctccacgaataagaactccttagcttggtaccagcagaaaccaggacagcctcctaaattactcctttcctgggcatctacgcgggaatccgggatccctgaccgattcagtggcagcgggtctgggacagatttcactctcactattgacagcctgcagcctgaagattctgcaacttactattgtcaacagtctgcccacttcccgatcacctttggccaagggacacgactggacattaaatccggaggtggtggctccgaggtgcagctggtcgagtctggaggaggattggtgcagcctggagggtcattgaaactctcatgtgcagcctctggattcaccttcaataagtacgccatgaactgggtccgccaggctccaggaaagggtttggaatgggttgctcgcataagaagtaaatataataattatgcaacatattatgccgattcagtgaaagacaggttcaccatctccagagatgattcaaaaaacactgcctatctacaaatgaacaacttgaaaactgaggacactgccgtgtactactgtgtgagacatgggaacttcggtaatagctacatatcctactgggcttactggggccaagggactctggtcaccgtctcctcaggtggtggtggttctggcggcggcggctccggtggtggtggttctcagactgttgtgactcaggaaccttcactcaccgtatcacctggtggaacagtcacactcacttgtggctcctcgactggggctgttacatctggctactacccaaactgggtccaacaaaaaccaggtcaggcaccccgtggtctaataggtgggactaagttcctcgcccccggtactcctgccagattctcaggctccctgcttggaggcaaggctgccctcaccctctcaggggtacagccagaggatgaggcagaatattactgtgctctatggtacagcaaccgctgggtgttcggtggaggaaccaaactgactgtccta

SEQ ID NO: 283 - protein, 505 aa, Artificial Sequence
  CD33 B3 HL x F12Q HL
QVQLVQSGAEVKKPGESVKVSCKASGYTFTNYGMNWVKQAPGQGLEWMGWINTYTGETNYADKFQGRVTFTSDTSTSTAYMELRNLKSDDTAVYYCARWSWSDGYYVYFDYWGQGTTVTVSSGGGGSGGGGSGGGGSDIVMTQSPDSMTVSLGERTTINCKSSQSVLDSSTNKNSLAWYQQKPGQPPKLLLSWASTRESGIPDRFSGSGSGTDFTLTIDSLQPEDSATYYCQQSAHFPITFGQGTRLDIKSGGGGSEVQLVESGGGLVQPGGSLKLSCAASGFTFNSYAMNWVRQAPGKGLEWVARIRSKYNNYATYYADSVKGRFTISRDDSKNTAYLQMNNLKTEDTAVYYCVRHGNFGNSYVSWWAYWGQGTLVTVSSGGGGSGGGGSGGGGSQTVVTQEPSLTVSPGGTVTLTCGSSTGAVTSGNYPNWVQQKPGQAPRGLIGGTKFLAPGTPARFSGSLLGGKAALTLSGVQPEDEAEYYCVLWYSNRWVFGGGTKLTVL

SEQ ID NO: 284 - DNA, 1515 bp, Artificial Sequence
  CD33 B3 HL x F12Q HL
caggtgcagctggtgcagtctggagctgaggtgaagaagcctggagagtcagtcaaggtctcctgcaaggctagcgggtataccttcacaaactatggaatgaactgggtgaagcaggctccaggacagggtttagagtggatgggctggataaacacctacactggagagacaaactatgctgataagttccagggacgcgttaccttcacttcggatacctctaccagcactgcctatatggaactccgcaacctcaaaagtgatgacacggctgtatattactgtgcgcgctggagttggagtgatggttactacgtttactttgactactggggccaaggcactacggtcaccgtctcctcaggtggtggtggttctggcggcggcggctccggtggtggtggttctgacatcgtgatgacacagtctccagactccatgactgtgtctctgggcgagaggaccaccatcaactgcaagtccagccagagtgttttagacagctccacgaataagaactccttagcttggtaccagcagaaaccaggacagcctcctaaattactcctttcctgggcatctacgcgggaatccgggatccctgaccgattcagtggcagcgggtctgggacagatttcactctcactattgacagcctgcagcctgaagattctgcaacttactattgtcaacagtctgcccacttcccgatcacctttggccaagggacacgactggacattaaatccggaggtggtggctccgaggtgcagctggtcgagtctggaggaggattggtgcagcctggagggtcattgaaactctcatgtgcagcctctggattcaccttcaatagctacgccatgaactgggtccgccaggctccaggaaagggtttggaatgggttgctcgcataagaagtaaatataataattatgcaacatattatgccgattcagtgaaaggcaggttcaccatctccagagatgattcaaaaaacactgcctatctacaaatgaacaacttgaaaactgaggacactgccgtgtactactgtgtgagacatgggaacttcggtaatagctacgtttcctggtgggcttactggggccaagggactctggtcaccgtctcctcaggtggtggtggttctggcggcggcggctccggtggtggtggttctcagactgttgtgactcaggaaccttcactcaccgtatcacctggtggaacagtcacactcacttgtggctcctcgactggggctgttacatctggcaactacccaaactgggtccaacaaaaaccaggtcaggcaccccgtggtctaataggtgggactaagttcctcgcccccggtactcctgccagattctcaggctccctgcttggaggcaaggctgccctcaccctctcaggggtacagccagaggatgaggcagaatattactgtgttctatggtacagcaaccgctgggtgttcggtggaggaaccaaactgactgtccta

SEQ ID NO: 285 - protein, 505 aa, Artificial Sequence
  CD33 B3 HL x I2C HL
QVQLVQSGAEVKKPGESVKVSCKASGYTFTNYGMNWVKQAPGQGLEWMGWINTYTGETNYADKFQGRVTFTSDTSTSTAYMELRNLKSDDTAVYYCARWSWSDGYYVYFDYWGQGTTVTVSSGGGGSGGGGSGGGGSDIVMTQSPDSMTVSLGERTTINCKSSQSVLDSSTNKNSLAWYQQKPGQPPKLLLSWASTRESGIPDRFSGSGSGTDFTLTIDSLQPEDSATYYCQQSAHFPITFGQGTRLDIKSGGGGSEVQLVESGGGLVQPGGSLKLSCAASGFTFNKYAMNWVRQAPGKGLEWVARIRSKYNNYATYYADSVKDRFTISRDDSKNTAYLQMNNLKTEDTAVYYCVRHGNFGNSYISYWAYWGQGTLVTVSSGGGGSGGGGSGGGGSQTVVTQEPSLTVSPGGTVTLTCGSSTGAVTSGNYPNWVQQKPGQAPRGLIGGTKFLAPGTPARFSGSLLGGKAALTLSGVQPEDEAEYYCVLWYSNRWVFGGGTKLTVL

SEQ ID NO: 286 - DNA, 1515 bp, Artificial Sequence
  CD33 B3 HL x I2C HL
caggtgcagctggtgcagtctggagctgaggtgaagaagcctggagagtcagtcaaggtctcctgcaaggctagcgggtataccttcacaaactatggaatgaactgggtgaagcaggctccaggacagggtttagagtggatgggctggataaacacctacactggagagacaaactatgctgataagttccagggacgcgttaccttcacttcggatacctctaccagcactgcctatatggaactccgcaacctcaaaagtgatgacacggctgtatattactgtgcgcgctggagttggagtgatggttactacgtttactttgactactggggccaaggcactacggtcaccgtctcctcaggtggtggtggttctggcggcggcggctccggtggtggtggttctgacatcgtgatgacacagtctccagactccatgactgtgtctctgggcgagaggaccaccatcaactgcaagtccagccagagtgttttagacagctccacgaataagaactccttagcttggtaccagcagaaaccaggacagcctcctaaattactcctttcctgggcatctacgcgggaatccgggatccctgaccgattcagtggcagcgggtctgggacagatttcactctcactattgacagcctgcagcctgaagattctgcaacttactattgtcaacagtctgcccacttcccgatcacctttggccaagggacacgactggacattaaatccggaggtggtggctccgaggtgcagctggtcgagtctggaggaggattggtgcagcctggagggtcattgaaactctcatgtgcagcctctggattcaccttcaataagtacgccatgaactgggtccgccaggctccaggaaagggtttggaatgggttgctcgcataagaagtaaatataataattatgcaacatattatgccgattcagtgaaagacaggttcaccatctccagagatgattcaaaaaacactgcctatctacaaatgaacaacttgaaaactgaggacactgccgtgtactactgtgtgagacatgggaacttcggtaatagctacatatcctactgggcttactggggccaagggactctggtcaccgtctcctcaggtggtggtggttctggcggcggcggctccggtggtggtggttctcagactgttgtgactcaggaaccttcactcaccgtatcacctggtggaacagtcacactcacttgtggctcctcgactggggctgttacatctggcaactacccaaactgggtccaacaaaaaccaggtcaggcaccccgtggtctaataggtgggactaagttcctcgcccccggtactcctgccagattctcaggctccctgcttggaggcaaggctgccctcaccctctcaggggtacagccagaggatgaggcagaatattactgtgttctatggtacagcaaccgctgggtgttcggtggaggaaccaaactgactgtccta

SEQ ID NO: 287 - protein, 505 aa, Artificial Sequence
  CD33 F2 HL x H2C HL
QVQLVQSGAEVKKPGESVKVSCKASGYTFTNYGMNWVKQAPGQGLEWMGWINTYTGETNYADKFQGRVTFTSDTSTSTAYMELRNLKSDDTAVYYCARWSWSDGYYVYFDYWGQGTTVTVSSGGGGSGGGGSGGGGSDIVMTQSPDSLSVSLGERTTINCKSSQSVLDSSTNKNSLAWYQQKPGQPPKLLLSWASTRESGIPDRFSGSGSGTDFTLTIDSLQPEDSATYYCQQSAHFPITFGQGTRLEIKSGGGGSEVQLVESGGGLVQPGGSLKLSCAASGFTFNKYAMNWVRQAPGKGLEWVARIRSKYNNYATYYADSVKDRFTISRDDSKNTAYLQMNNLKTEDTAVYYCVRHGNFGNSYISYWAYWGQGTLVTVSSGGGGSGGGGSGGGGSQTVVTQEPSLTVSPGGTVTLTCGSSTGAVTSGYYPNWVQQKPGQAPRGLIGGTKFLAPGTPARFSGSLLGGKAALTLSGVQPEDEAEYYCALWYSNRWVFGGGTKLTVL

SEQ ID NO: 288 - DNA, 1515 bp, Artificial Sequence
  CD33 F2 HL x H2C HL
caggtgcagctggtgcagtctggagctgaggtgaagaagcctggagagtcagtcaaggtctcctgcaaggctagcgggtataccttcacaaactatggaatgaactgggtgaagcaggctccaggacagggtttagagtggatgggctggataaacacctacactggagagacaaactatgctgataagttccagggacgcgttaccttcacttcggatacctctaccagcactgcctatatggaactccgcaacctcaaaagtgatgacacggctgtatattactgtgcgcgctggagttggagtgatggttactacgtttactttgactactggggccaaggcactacggtcaccgtctcctcaggtggtggtggttctggcggcggcggctccggtggtggtggttctgacatcgtgatgacacagtctccagactccctgtctgtgtctctgggcgagaggaccaccatcaactgcaagtccagccagagtgttttagacagctccacgaataagaactccttagcttggtaccagcagaaaccaggacagcctcctaaattactcctttcctgggcatctacgcgggaatccgggatccctgaccgattcagtggcagcgggtctgggacagatttcactctcactattgacagcctgcagcctgaagattctgcaacttactattgtcaacagtctgcccacttcccgatcacctttggccaagggacacgactggagattaaatccggaggtggtggctccgaggtgcagctggtcgagtctggaggaggattggtgcagcctggagggtcattgaaactctcatgtgcagcctctggattcaccttcaataagtacgccatgaactgggtccgccaggctccaggaaagggtttggaatgggttgctcgcataagaagtaaatataataattatgcaacatattatgccgattcagtgaaagacaggttcaccatctccagagatgattcaaaaaacactgcctatctacaaatgaacaacttgaaaactgaggacactgccgtgtactactgtgtgagacatgggaacttcggtaatagctacatatcctactgggcttactggggccaagggactctggtcaccgtctcctcaggtggtggtggttctggcggcggcggctccggtggtggtggttctcagactgttgtgactcaggaaccttcactcaccgtatcacctggtggaacagtcacactcacttgtggctcctcgactggggctgttacatctggctactacccaaactgggtccaacaaaaaccaggtcaggcaccccgtggtctaataggtgggactaagttcctcgcccccggtactcctgccagattctcaggctccctgcttggaggcaaggctgccctcaccctctcaggggtacagccagaggatgaggcagaatattactgtgctctatggtacagcaaccgctgggtgttcggtggaggaaccaaactgactgtccta

SEQ ID NO: 289 - protein, 505 aa, Artificial Sequence
  CD33 F2 HL x F12Q HL
QVQLVQSGAEVKKPGESVKVSCKASGYTFTNYGMNWVKQAPGQGLEWMGWINTYTGETNYADKFQGRVTFTSDTSTSTAYMELRNLKSDDTAVYYCARWSWSDGYYVYFDYWGQGTTVTVSSGGGGSGGGGSGGGGSDIVMTQSPDSLSVSLGERTTINCKSSQSVLDSSTNKNSLAWYQQKPGQPPKLLLSWASTRESGIPDRFSGSGSGTDFTLTIDSLQPEDSATYYCQQSAHFPITFGQGTRLEIKSGGGGSEVQLVESGGGLVQPGGSLKLSCAASGFTFNSYAMNWVRQAPGKGLEWVARIRSKYNNYATYYADSVKGRFTISRDDSKNTAYLQMNNLKTEDTAVYYCVRHGNFGNSYVSWWAYWGQGTLVTVSSGGGGSGGGGSGGGGSQTVVTQEPSLTVSPGGTVTLTCGSSTGAVTSGNYPNWVQQKPGQAPRGLIGGTKFLAPGTPARFSGSLLGGKAALTLSGVQPEDEAEYYCVLWYSNRWVFGGGTKLTVL

SEQ ID NO: 290 - DNA, 1515 bp, Artificial Sequence
  CD33 F2 HL x F12Q HL
caggtgcagctggtgcagtctggagctgaggtgaagaagcctggagagtcagtcaaggtctcctgcaaggctagcgggtataccttcacaaactatggaatgaactgggtgaagcaggctccaggacagggtttagagtggatgggctggataaacacctacactggagagacaaactatgctgataagttccagggacgcgttaccttcacttcggatacctctaccagcactgcctatatggaactccgcaacctcaaaagtgatgacacggctgtatattactgtgcgcgctggagttggagtgatggttactacgtttactttgactactggggccaaggcactacggtcaccgtctcctcaggtggtggtggttctggcggcggcggctccggtggtggtggttctgacatcgtgatgacacagtctccagactccctgtctgtgtctctgggcgagaggaccaccatcaactgcaagtccagccagagtgttttagacagctccacgaataagaactccttagcttggtaccagcagaaaccaggacagcctcctaaattactcctttcctgggcatctacgcgggaatccgggatccctgaccgattcagtggcagcgggtctgggacagatttcactctcactattgacagcctgcagcctgaagattctgcaacttactattgtcaacagtctgcccacttcccgatcacctttggccaagggacacgactggagattaaatccggaggtggtggctccgaggtgcagctggtcgagtctggaggaggattggtgcagcctggagggtcattgaaactctcatgtgcagcctctggattcaccttcaatagctacgccatgaactgggtccgccaggctccaggaaagggtttggaatgggttgctcgcataagaagtaaatataataattatgcaacatattatgccgattcagtgaaaggcaggttcaccatctccagagatgattcaaaaaacactgcctatctacaaatgaacaacttgaaaactgaggacactgccgtgtactactgtgtgagacatgggaacttcggtaatagctacgtttcctggtgggcttactggggccaagggactctggtcaccgtctcctcaggtggtggtggttctggcggcggcggctccggtggtggtggttctcagactgttgtgactcaggaaccttcactcaccgtatcacctggtggaacagtcacactcacttgtggctcctcgactggggctgttacatctggcaactacccaaactgggtccaacaaaaaccaggtcaggcaccccgtggtctaataggtgggactaagttcctcgcccccggtactcctgccagattctcaggctccctgcttggaggcaaggctgccctcaccctctcaggggtacagccagaggatgaggcagaatattactgtgttctatggtacagcaaccgctgggtgttcggtggaggaaccaaactgactgtccta

SEQ ID NO: 291 - protein, 505 aa, Artificial Sequence
  CD33 F2 HL x I2C HL
QVQLVQSGAEVKKPGESVKVSCKASGYTFTNYGMNWVKQAPGQGLEWMGWINTYTGETNYADKFQGRVTFTSDTSTSTAYMELRNLKSDDTAVYYCARWSWSDGYYVYFDYWGQGTTVTVSSGGGGSGGGGSGGGGSDIVMTQSPDSLSVSLGERTTINCKSSQSVLDSSTNKNSLAWYQQKPGQPPKLLLSWASTRESGIPDRFSGSGSGTDFTLTIDSLQPEDSATYYCQQSAHFPITFGQGTRLEIKSGGGGSEVQLVESGGGLVQPGGSLKLSCAASGFTFNKYAMNWVRQAPGKGLEWVARIRSKYNNYATYYADSVKDRFTISRDDSKNTAYLQMNNLKTEDTAVYYCVRHGNFGNSYISYWAYWGQGTLVTVSSGGGGSGGGGSGGGGSQTVVTQEPSLTVSPGGTVTLTCGSSTGAVTSGNYPNWVQQKPGQAPRGLIGGTKFLAPGTPARFSGSLLGGKAALTLSGVQPEDEAEYYCVLWYSNRWVFGGGTKLTVL

SEQ ID NO: 292 - DNA, 1515 bp, Artificial Sequence
  CD33 F2 HL x I2C HL
caggtgcagctggtgcagtctggagctgaggtgaagaagcctggagagtcagtcaaggtctcctgcaaggctagcgggtataccttcacaaactatggaatgaactgggtgaagcaggctccaggacagggtttagagtggatgggctggataaacacctacactggagagacaaactatgctgataagttccagggacgcgttaccttcacttcggatacctctaccagcactgcctatatggaactccgcaacctcaaaagtgatgacacggctgtatattactgtgcgcgctggagttggagtgatggttactacgtttactttgactactggggccaaggcactacggtcaccgtctcctcaggtggtggtggttctggcggcggcggctccggtggtggtggttctgacatcgtgatgacacagtctccagactccctgtctgtgtctctgggcgagaggaccaccatcaactgcaagtccagccagagtgttttagacagctccacgaataagaactccttagcttggtaccagcagaaaccaggacagcctcctaaattactcctttcctgggcatctacgcgggaatccgggatccctgaccgattcagtggcagcgggtctgggacagatttcactctcactattgacagcctgcagcctgaagattctgcaacttactattgtcaacagtctgcccacttcccgatcacctttggccaagggacacgactggagattaaatccggaggtggtggctccgaggtgcagctggtcgagtctggaggaggattggtgcagcctggagggtcattgaaactctcatgtgcagcctctggattcaccttcaataagtacgccatgaactgggtccgccaggctccaggaaagggtttggaatgggttgctcgcataagaagtaaatataataattatgcaacatattatgccgattcagtgaaagacaggttcaccatctccagagatgattcaaaaaacactgcctatctacaaatgaacaacttgaaaactgaggacactgccgtgtactactgtgtgagacatgggaacttcggtaatagctacatatcctactgggcttactggggccaagggactctggtcaccgtctcctcaggtggtggtggttctggcggcggcggctccggtggtggtggttctcagactgttgtgactcaggaaccttcactcaccgtatcacctggtggaacagtcacactcacttgtggctcctcgactggggctgttacatctggcaactacccaaactgggtccaacaaaaaccaggtcaggcaccccgtggtctaataggtgggactaagttcctcgcccccggtactcctgccagattctcaggctccctgcttggaggcaaggctgccctcaccctctcaggggtacagccagaggatgaggcagaatattactgtgttctatggtacagcaaccgctgggtgttcggtggaggaaccaaactgactgtccta

SEQ ID NO: 293 - protein, 505 aa, Artificial Sequence
  CD33 B10 HL x H2C HL
QVQLVQSGAEVKKPGESVKVSCKASGYTFTNYGMNWVKQAPGQGLEWMGWINTYTGEPTYADKFQGRVTMTTDTSTSTAYMEIRNLRSDDTAVYYCARWSWSDGYYVYFDYWGQGTTVTVSSGGGGSGGGGSGGGGSDIVMTQSPDSLTVSLGERTTINCKSSQSVLDSSNNKNSLAWYQQKPGQPPKLLLSWASTRESGIPDRFSGSGSGTDFTLTIDGLQPEDSATYYCQQSAHFPITFGQGTRLEIKSGGGGSEVQLVESGGGLVQPGGSLKLSCAASGFTFNKYAMNWVRQAPGKGLEWVARIRSKYNNYATYYADSVKDRFTISRDDSKNTAYLQMNNLKTEDTAVYYCVRHGNFGNSYISYWAYWGQGTLVTVSSGGGGSGGGGSGGGGSQTVVTQEPSLTVSPGGTVTLTCGSSTGAVTSGYYPNWVQQKPGQAPRGLIGGTKFLAPGTPARFSGSLLGGKAALTLSGVQPEDEAEYYCALWYSNRWVFGGGTKLTVL

SEQ ID NO: 294 - DNA, 1515 bp, Artificial Sequence
  CD33 B10 HL x H2C HL
caggtgcagctggtgcagtctggagctgaggtgaagaagcctggtgagtcagtcaaggtctcctgcaaggctagcgggtataccttcacaaactatggaatgaactgggtgaagcaggctccaggacagggtttagagtggatgggctggataaacacctacactggagagccaacctatgctgataagttccagggacgcgttaccatgactacggatacctctaccagcactgcctatatggaaatccgcaacctcagaagtgatgacacggctgtatattactgtgcgcgctggagttggagtgatggttactacgtttactttgactactggggccaaggcactacggtcaccgtctcctcaggtggtggtggttctggcggcggcggctccggtggtggtggttctgacatcgtgatgacacagtctccagactccctgactgtgtctctgggcgagaggaccaccatcaactgcaagtccagccagagtgttttagacagctccaacaataagaactccttagcttggtaccagcagaaaccaggacagcctcctaaattactcctttcctgggcatctacgcgggaatccgggatccctgaccgattcagtggcagcggttctgggacagatttcactctcactattgacggcctgcagcctgaagattctgcaacttactattgtcaacagtctgcccacttcccgatcacctttggccaagggacacgactggagattaaatccggaggtggtggctccgaggtgcagctggtcgagtctggaggaggattggtgcagcctggagggtcattgaaactctcatgtgcagcctctggattcaccttcaataagtacgccatgaactgggtccgccaggctccaggaaagggtttggaatgggttgctcgcataagaagtaaatataataattatgcaacatattatgccgattcagtgaaagacaggttcaccatctccagagatgattcaaaaaacactgcctatctacaaatgaacaacttgaaaactgaggacactgccgtgtactactgtgtgagacatgggaacttcggtaatagctacatatcctactgggcttactggggccaagggactctggtcaccgtctcctcaggtggtggtggttctggcggcggcggctccggtggtggtggttctcagactgttgtgactcaggaaccttcactcaccgtatcacctggtggaacagtcacactcacttgtggctcctcgactggggctgttacatctggctactacccaaactgggtccaacaaaaaccaggtcaggcaccccgtggtctaataggtgggactaagttcctcgcccccggtactcctgccagattctcaggctccctgcttggaggcaaggctgccctcaccctctcaggggtacagccagaggatgaggcagaatattactgtgctctatggtacagcaaccgctgggtgttcggtggaggaaccaaactgactgtccta

SEQ ID NO: 295 - protein, 505 aa, Artificial Sequence
  CD33 B10 HL x F12Q HL
QVQLVQSGAEVKKPGESVKVSCKASGYTFTNYGMNWVKQAPGQGLEWMGWINTYTGEPTYADKFQGRVTMTTDTSTSTAYMEIRNLRSDDTAVYYCARWSWSDGYYVYFDYWGQGTTVTVSSGGGGSGGGGSGGGGSDIVMTQSPDSLTVSLGERTTINCKSSQSVLDSSNNKNSLAWYQQKPGQPPKLLLSWASTRESGIPDRFSGSGSGTDFTLTIDGLQPEDSATYYCQQSAHFPITFGQGTRLEIKSGGGGSEVQLVESGGGLVQPGGSLKLSCAASGFTFNSYAMNWVRQAPGKGLEWVARIRSKYNNYATYYADSVKGRFTISRDDSKNTAYLQMNNLKTEDTAVYYCVRHGNFGNSYVSWWAYWGQGTLVTVSSGGGGSGGGGSGGGGSQTVVTQEPSLTVSPGGTVTLTCGSSTGAVTSGNYPNWVQQKPGQAPRGLIGGTKFLAPGTPARFSGSLLGGKAALTLSGVQPEDEAEYYCVLWYSNRWVFGGGTKLTVL

SEQ ID NO: 296 - DNA, 1515 bp, Artificial Sequence
  CD33 B10 HL x F12Q HL
caggtgcagctggtgcagtctggagctgaggtgaagaagcctggtgagtcagtcaaggtctcctgcaaggctagcgggtataccttcacaaactatggaatgaactgggtgaagcaggctccaggacagggtttagagtggatgggctggataaacacctacactggagagccaacctatgctgataagttccagggacgcgttaccatgactacggatacctctaccagcactgcctatatggaaatccgcaacctcagaagtgatgacacggctgtatattactgtgcgcgctggagttggagtgatggttactacgtttactttgactactggggccaaggcactacggtcaccgtctcctcaggtggtggtggttctggcggcggcggctccggtggtggtggttctgacatcgtgatgacacagtctccagactccctgactgtgtctctgggcgagaggaccaccatcaactgcaagtccagccagagtgttttagacagctccaacaataagaactccttagcttggtaccagcagaaaccaggacagcctcctaaattactcctttcctgggcatctacgcgggaatccgggatccctgaccgattcagtggcagcggttctgggacagatttcactctcactattgacggcctgcagcctgaagattctgcaacttactattgtcaacagtctgcccacttcccgatcacctttggccaagggacacgactggagattaaatccggaggtggtggctccgaggtgcagctggtcgagtctggaggaggattggtgcagcctggagggtcattgaaactctcatgtgcagcctctggattcaccttcaatagctacgccatgaactgggtccgccaggctccaggaaagggtttggaatgggttgctcgcataagaagtaaatataataattatgcaacatattatgccgattcagtgaaaggcaggttcaccatctccagagatgattcaaaaaacactgcctatctacaaatgaacaacttgaaaactgaggacactgccgtgtactactgtgtgagacatgggaacttcggtaatagctacgtttcctggtgggcttactggggccaagggactctggtcaccgtctcctcaggtggtggtggttctggcggcggcggctccggtggtggtggttctcagactgttgtgactcaggaaccttcactcaccgtatcacctggtggaacagtcacactcacttgtggctcctcgactggggctgttacatctggcaactacccaaactgggtccaacaaaaaccaggtcaggcaccccgtggtctaataggtgggactaagttcctcgcccccggtactcctgccagattctcaggctccctgcttggaggcaaggctgccctcaccctctcaggggtacagccagaggatgaggcagaatattactgtgttctatggtacagcaaccgctgggtgttcggtggaggaaccaaactgactgtccta

SEQ ID NO: 297 - protein, 505 aa, Artificial Sequence
  CD33 B10 HL x I2C HL
QVQLVQSGAEVKKPGESVKVSCKASGYTFTNYGMNWVKQAPGQGLEWMGWINTYTGEPTYADKFQGRVTMTTDTSTSTAYMEIRNLRSDDTAVYYCARWSWSDGYYVYFDYWGQGTTVTVSSGGGGSGGGGSGGGGSDIVMTQSPDSLTVSLGERTTINCKSSQSVLDSSNNKNSLAWYQQKPGQPPKLLLSWASTRESGIPDRFSGSGSGTDFTLTIDGLQPEDSATYYCQQSAHFPITFGQGTRLEIKSGGGGSEVQLVESGGGLVQPGGSLKLSCAASGFTFNKYAMNWVRQAPGKGLEWVARIRSKYNNYATYYADSVKDRFTISRDDSKNTAYLQMNNLKTEDTAVYYCVRHGNFGNSYISYWAYWGQGTLVTVSSGGGGSGGGGSGGGGSQTVVTQEPSLTVSPGGTVTLTCGSSTGAVTSGNYPNWVQQKPGQAPRGLIGGTKFLAPGTPARFSGSLLGGKAALTLSGVQPEDEAEYYCVLWYSNRWVFGGGTKLTVL

SEQ ID NO: 298 - DNA, 1515 bp, Artificial Sequence
  CD33 B10 HL x I2C HL
caggtgcagctggtgcagtctggagctgaggtgaagaagcctggtgagtcagtcaaggtctcctgcaaggctagcgggtataccttcacaaactatggaatgaactgggtgaagcaggctccaggacagggtttagagtggatgggctggataaacacctacactggagagccaacctatgctgataagttccagggacgcgttaccatgactacggatacctctaccagcactgcctatatggaaatccgcaacctcagaagtgatgacacggctgtatattactgtgcgcgctggagttggagtgatggttactacgtttactttgactactggggccaaggcactacggtcaccgtctcctcaggtggtggtggttctggcggcggcggctccggtggtggtggttctgacatcgtgatgacacagtctccagactccctgactgtgtctctgggcgagaggaccaccatcaactgcaagtccagccagagtgttttagacagctccaacaataagaactccttagcttggtaccagcagaaaccaggacagcctcctaaattactcctttcctgggcatctacgcgggaatccgggatccctgaccgattcagtggcagcggttctgggacagatttcactctcactattgacggcctgcagcctgaagattctgcaacttactattgtcaacagtctgcccacttcccgatcacctttggccaagggacacgactggagattaaatccggaggtggtggctccgaggtgcagctggtcgagtctggaggaggattggtgcagcctggagggtcattgaaactctcatgtgcagcctctggattcaccttcaataagtacgccatgaactgggtccgccaggctccaggaaagggtttggaatgggttgctcgcataagaagtaaatataataattatgcaacatattatgccgattcagtgaaagacaggttcaccatctccagagatgattcaaaaaacactgcctatctacaaatgaacaacttgaaaactgaggacactgccgtgtactactgtgtgagacatgggaacttcggtaatagctacatatcctactgggcttactggggccaagggactctggtcaccgtctcctcaggtggtggtggttctggcggcggcggctccggtggtggtggttctcagactgttgtgactcaggaaccttcactcaccgtatcacctggtggaacagtcacactcacttgtggctcctcgactggggctgttacatctggcaactacccaaactgggtccaacaaaaaccaggtcaggcaccccgtggtctaataggtgggactaagttcctcgcccccggtactcctgccagattctcaggctccctgcttggaggcaaggctgccctcaccctctcaggggtacagccagaggatgaggcagaatattactgtgttctatggtacagcaaccgctgggtgttcggtggaggaaccaaactgactgtccta

SEQ ID NO: 299 - protein, 505 aa, Artificial Sequence
  CD33 E11 HL x H2C HL
QVQLVQSGAEVKKPGESVKVSCKASGYTFTNYGMNWVKQAPGQGLEWMGWINTYTGEPTYADKFQGRVTMTTDTSTSTAYMEIRNLGGDDTAVYYCARWSWSDGYYVYFDYWGQGTSVTVSSGGGGSGGGGSGGGGSDIVMTQSPDSLTVSLGERTTINCKSSQSVLDSSTNKNSLAWYQQKPGQPPKLLLSWASTRESGIPDRFSGSGSGTDFTLTIDSPQPEDSATYYCQQSAHFPITFGQGTRLEIKSGGGGSEVQLVESGGGLVQPGGSLKLSCAASGFTFNKYAMNWVRQAPGKGLEWVARIRSKYNNYATYYADSVKDRFTISRDDSKNTAYLQMNNLKTEDTAVYYCVRHGNFGNSYISYWAYWGQGTLVTVSSGGGGSGGGGSGGGGSQTVVTQEPSLTVSPGGTVTLTCGSSTGAVTSGYYPNWVQQKPGQAPRGLIGGTKFLAPGTPARFSGSLLGGKAALTLSGVQPEDEAEYYCALWYSNRWVFGGGTKLTVL

SEQ ID NO: 300 - DNA, 1515 bp, Artificial Sequence
  CD33 E11 HL x H2C HL
caggtgcagctggtgcagtctggagctgaggtgaagaagcctggagagtcagtcaaggtctcctgcaaggctagcgggtataccttcacaaactatggaatgaactgggtgaagcaggctccaggacagggtttagagtggatgggctggataaacacctacactggagagccaacctatgctgataagttccagggacgcgttaccatgactacggatacctctaccagcactgcctatatggaaatccgcaacctcggaggtgatgacacggctgtatattactgtgcgcgctggagttggagtgatggttactacgtttactttgactactggggccaaggcacttcggtcaccgtctcctcaggtggtggtggttctggcggcggcggctccggtggtggtggttctgacatcgtgatgacacagtctccagactccctgactgtgtctctgggcgagaggaccaccatcaactgcaagtccagccagagtgttttagacagctccacgaataagaactccttagcttggtaccagcagaaaccaggacagcctcctaaattactcctttcctgggcatctacgcgggaatccgggatccctgaccgattcagtggcagcgggtctgggacagatttcactctcactattgacagcccgcagcctgaagattctgcaacttactattgtcaacagtctgcccacttcccgatcacctttggccaagggacacgactggagattaaatccggaggtggtggctccgaggtgcagctggtcgagtctggaggaggattggtgcagcctggagggtcattgaaactctcatgtgcagcctctggattcaccttcaataagtacgccatgaactgggtccgccaggctccaggaaagggtttggaatgggttgctcgcataagaagtaaatataataattatgcaacatattatgccgattcagtgaaagacaggttcaccatctccagagatgattcaaaaaacactgcctatctacaaatgaacaacttgaaaactgaggacactgccgtgtactactgtgtgagacatgggaacttcggtaatagctacatatcctactgggcttactggggccaagggactctggtcaccgtctcctcaggtggtggtggttctggcggcggcggctccggtggtggtggttctcagactgttgtgactcaggaaccttcactcaccgtatcacctggtggaacagtcacactcacttgtggctcctcgactggggctgttacatctggctactacccaaactgggtccaacaaaaaccaggtcaggcaccccgtggtctaataggtgggactaagttcctcgcccccggtactcctgccagattctcaggctccctgcttggaggcaaggctgccctcaccctctcaggggtacagccagaggatgaggcagaatattactgtgctctatggtacagcaaccgctgggtgttcggtggaggaaccaaactgactgtccta

SEQ ID NO: 301 - protein, 505 aa, Artificial Sequence
  CD33 E11 HL x F12Q HL
QVQLVQSGAEVKKPGESVKVSCKASGYTFTNYGMNWVKQAPGQGLEWMGWINTYTGEPTYADKFQGRVTMTTDTSTSTAYMEIRNLGGDDTAVYYCARWSWSDGYYVYFDYWGQGTSVTVSSGGGGSGGGGSGGGGSDIVMTQSPDSLTVSLGERTTINCKSSQSVLDSSTNKNSLAWYQQKPGQPPKLLLSWASTRESGIPDRFSGSGSGTDFTLTIDSPQPEDSATYYCQQSAHFPITFGQGTRLEIKSGGGGSEVQLVESGGGLVQPGGSLKLSCAASGFTFNSYAMNWVRQAPGKGLEWVARIRSKYNNYATYYADSVKGRFTISRDDSKNTAYLQMNNLKTEDTAVYYCVRHGNFGNSYVSWWAYWGQGTLVTVSSGGGGSGGGGSGGGGSQTVVTQEPSLTVSPGGTVTLTCGSSTGAVTSGNYPNWVQQKPGQAPRGLIGGTKFLAPGTPARFSGSLLGGKAALTLSGVQPEDEAEYYCVLWYSNRWVFGGGTKLTVL

SEQ ID NO: 302 - DNA, 1515 bp, Artificial Sequence
  CD33 E11 HL x F12Q HL
caggtgcagctggtgcagtctggagctgaggtgaagaagcctggagagtcagtcaaggtctcctgcaaggctagcgggtataccttcacaaactatggaatgaactgggtgaagcaggctccaggacagggtttagagtggatgggctggataaacacctacactggagagccaacctatgctgataagttccagggacgcgttaccatgactacggatacctctaccagcactgcctatatggaaatccgcaacctcggaggtgatgacacggctgtatattactgtgcgcgctggagttggagtgatggttactacgtttactttgactactggggccaaggcacttcggtcaccgtctcctcaggtggtggtggttctggcggcggcggctccggtggtggtggttctgacatcgtgatgacacagtctccagactccctgactgtgtctctgggcgagaggaccaccatcaactgcaagtccagccagagtgttttagacagctccacgaataagaactccttagcttggtaccagcagaaaccaggacagcctcctaaattactcctttcctgggcatctacgcgggaatccgggatccctgaccgattcagtggcagcgggtctgggacagatttcactctcactattgacagcccgcagcctgaagattctgcaacttactattgtcaacagtctgcccacttcccgatcacctttggccaagggacacgactggagattaaatccggaggtggtggctccgaggtgcagctggtcgagtctggaggaggattggtgcagcctggagggtcattgaaactctcatgtgcagcctctggattcaccttcaatagctacgccatgaactgggtccgccaggctccaggaaagggtttggaatgggttgctcgcataagaagtaaatataataattatgcaacatattatgccgattcagtgaaaggcaggttcaccatctccagagatgattcaaaaaacactgcctatctacaaatgaacaacttgaaaactgaggacactgccgtgtactactgtgtgagacatgggaacttcggtaatagctacgtttcctggtgggcttactggggccaagggactctggtcaccgtctcctcaggtggtggtggttctggcggcggcggctccggtggtggtggttctcagactgttgtgactcaggaaccttcactcaccgtatcacctggtggaacagtcacactcacttgtggctcctcgactggggctgttacatctggcaactacccaaactgggtccaacaaaaaccaggtcaggcaccccgtggtctaataggtgggactaagttcctcgcccccggtactcctgccagattctcaggctccctgcttggaggcaaggctgccctcaccctctcaggggtacagccagaggatgaggcagaatattactgtgttctatggtacagcaaccgctgggtgttcggtggaggaaccaaactgactgtccta

SEQ ID NO: 303 - protein, 505 aa, Artificial Sequence
  CD33 E11 HL x I2C HL
QVQLVQSGAEVKKPGESVKVSCKASGYTFTNYGMNWVKQAPGQGLEWMGWINTYTGEPTYADKFQGRVTMTTDTSTSTAYMEIRNLGGDDTAVYYCARWSWSDGYYVYFDYWGQGTSVTVSSGGGGSGGGGSGGGGSDIVMTQSPDSLTVSLGERTTINCKSSQSVLDSSTNKNSLAWYQQKPGQPPKLLLSWASTRESGIPDRFSGSGSGTDFTLTIDSPQPEDSATYYCQQSAHFPITFGQGTRLEIKSGGGGSEVQLVESGGGLVQPGGSLKLSCAASGFTFNKYAMNWVRQAPGKGLEWVARIRSKYNNYATYYADSVKDRFTISRDDSKNTAYLQMNNLKTEDTAVYYCVRHGNFGNSYISYWAYWGQGTLVTVSSGGGGSGGGGSGGGGSQTVVTQEPSLTVSPGGTVTLTCGSSTGAVTSGNYPNWVQQKPGQAPRGLIGGTKFLAPGTPARFSGSLLGGKAALTLSGVQPEDEAEYYCVLWYSNRWVFGGGTKLTVL

SEQ ID NO: 304 - DNA, 1515 bp, Artificial Sequence
  CD33 E11 HL x I2C HL
caggtgcagctggtgcagtctggagctgaggtgaagaagcctggagagtcagtcaaggtctcctgcaaggctagcgggtataccttcacaaactatggaatgaactgggtgaagcaggctccaggacagggtttagagtggatgggctggataaacacctacactggagagccaacctatgctgataagttccagggacgcgttaccatgactacggatacctctaccagcactgcctatatggaaatccgcaacctcggaggtgatgacacggctgtatattactgtgcgcgctggagttggagtgatggttactacgtttactttgactactggggccaaggcacttcggtcaccgtctcctcaggtggtggtggttctggcggcggcggctccggtggtggtggttctgacatcgtgatgacacagtctccagactccctgactgtgtctctgggcgagaggaccaccatcaactgcaagtccagccagagtgttttagacagctccacgaataagaactccttagcttggtaccagcagaaaccaggacagcctcctaaattactcctttcctgggcatctacgcgggaatccgggatccctgaccgattcagtggcagcgggtctgggacagatttcactctcactattgacagcccgcagcctgaagattctgcaacttactattgtcaacagtctgcccacttcccgatcacctttggccaagggacacgactggagattaaatccggaggtggtggctccgaggtgcagctggtcgagtctggaggaggattggtgcagcctggagggtcattgaaactctcatgtgcagcctctggattcaccttcaataagtacgccatgaactgggtccgccaggctccaggaaagggtttggaatgggttgctcgcataagaagtaaatataataattatgcaacatattatgccgattcagtgaaagacaggttcaccatctccagagatgattcaaaaaacactgcctatctacaaatgaacaacttgaaaactgaggacactgccgtgtactactgtgtgagacatgggaacttcggtaatagctacatatcctactgggcttactggggccaagggactctggtcaccgtctcctcaggtggtggtggttctggcggcggcggctccggtggtggtggttctcagactgttgtgactcaggaaccttcactcaccgtatcacctggtggaacagtcacactcacttgtggctcctcgactggggctgttacatctggcaactacccaaactgggtccaacaaaaaccaggtcaggcaccccgtggtctaataggtgggactaagttcctcgcccccggtactcctgccagattctcaggctccctgcttggaggcaaggctgccctcaccctctcaggggtacagccagaggatgaggcagaatattactgtgttctatggtacagcaaccgctgggtgttcggtggaggaaccaaactgactgtccta

SEQ ID NO: 305 - DNA, 1125 bp, Homo sapiens
atgggatggagctgtatcatcctcttcttggtagcaacagctacaggtgtacactccgatccaaatttctggctgcaagtgcaggagtcagtgacggtacaggagggtttgtgcgtcctcgtgccctgcactttcttccatcccataccctactacgacaagaactccccagttcatggttactggttccgggaaggagccattatatccggggactctccagtggccacaaacaagctagatcaagaagtacaggaggagactcagggcagattccgcctccttggggatcccagtaggaacaactgctccctgagcatcgtagacgccaggaggagggataatggttcatacttctttcggatggagagaggaagtaccaaatacagttacaaatctccccagctctctgtgcatgtgacagacttgacccacaggcccaaaatcctcatccctggcactctagaacccggccactccaaaaacctgacctgctctgtgtcctgggcctgtgagcagggaacacccccgatcttctcctggttgtcagctgcccccacctccctgggccccaggactactcactcctcggtgctcataatcaccccacggccccaggaccacggcaccaacctgacctgtcaggtgaagttcgctggagctggtgtgactacggagagaaccatccagctcaacgtcacctatgttccacagaacccaacaactggtatctttccaggagatggctcagggaaacaagagaccagagcaggagtggttcatggggccattggaggagctggtgttacagccctgctcgctctttgtctctgcctcatcttcttcatagtgaagacccacaggaggaaagcagccaggacagcagtgggcaggaatgacacccaccctaccacagggtcagcctccccgaaacaccagaagaagtccaagttacatggccccactgaaacctcaagctgttcaggtgccgcccctactgtggagatggatgaggagctgcattatgcttccctcaactttcatgggatgaatccttccaaggacacctccaccgaatactcagaggtcaggacccagtccgggcatcatcaccatcatcattga

SEQ ID NO: 306 - protein, 374 aa, Homo sapiens
MGWSCIILFLVATATGVHSDPNFWLQVQESVTVQEGLCVLVPCTFFHPIPYYDKNSPVHGYWFREGAIISGDSPVATNKLDQEVQEETQGRFRLLGDPSRNNCSLSIVDARRRDNGSYFFRMERGSTKYSYKSPQLSVHVTDLTHRPKILIPGTLEPGHSKNLTCSVSWACEQGTPPIFSWLSAAPTSLGPRTTHSSVLIITPRPQDHGTNLTCQVKFAGAGVTTERTIQLNVTYVPQNPTTGIFPGDGSGKQETRAGVVHGAIGGAGVTALLALCLCLIFFIVKTHRRKAARTAVGRNDTHPTTGSASPKHQKKSKLHGPTETSSCSGAAPTVEMDEELHYASLNFHGMNPSKDTSTEYSEVRTQSGHHHHHH

SEQ ID NO: 307 - DNA, 1083 bp, Macaca sp.
atgccgctgctgctactgctgcccctgctgtgggcaggggccctggctatggatccaagagtcaggctggaagtgcaggagtcagtgacagtacaggagggtttgtgcgtccttgtgccctgcactttcttccatcccgtaccctaccacaccaggaattccccagttcatggttactggttccgggaaggagccattgtatccttggactctccagtggccacaaacaagctagatcaagaagtacaggaggagacccagggccgattccgcctccttggggatcccagtaggaacaactgctccctgagcatcgtagatgccaggaggagggataacggttcatacttctttcggatggagaaaggaagtaccaaatacagttacaaatctacccagctctctgtgcatgtgacagacttgacccacaggccccaaatcctcatccctggagccctagaccctgaccactccaaaaacctgacctgctctgtgccctgggcctgtgagcagggaacacctccaatcttctcctggatgtcagctgcccccacctccctgggcctcaggaccactcactcctcggtgctcataatcaccccacggccccaggaccacggcaccaacctcacctgtcaggtgaagttccctggagctggcgtgaccacggagagaaccatccagctcaatgtctcctatgcttcacagaacccaagaactgatatctttctaggagacggctcagggaaacaaggagtggttcagggagccatcgggggagctggtgtcacagtcctgctcgctctttgtctctgcctcatcttcttcacagtgaagactcacaggaggaaagcagccaggacagcagtgggcaggatcgacacccaccccgccacagggccaacatcctcgaaacaccagaagaagtccaagttacatggcgccactgaaacctcaggctgttcaggtaccacccttactgtggagatggatgaggagctgcactacgcttccctcaactttcatgggatgaatccttctgaggacacctccaccgaatactcagaggtcaggacccagtga

SEQ ID NO: 308 - protein, 360 aa, Macaca sp.
MPLLLLLPLLWAGALAMDPRVRLEVQESVTVQEGLCVLVPCTFFHPVPYHTRNSPVHGYWFREGAIVSLDSPVATNKLDQEVQEETQGRFRLLGDPSRNNCSLSIVDARRRDNGSYFFRMEKGSTKYSYKSTQLSVHVTDLTHRPQILIPGALDPDHSKNLTCSVPWACEQGTPPIFSWMSAAPTSLGLRTTHSSVLIITPRPQDHGTNLTCQVKFPGAGVTTERTIQLNVSYASQNPRTDIFLGDGSGKQGVVQGAIGGAGVTVLLALCLCLIFFTVKTHRRKAARTAVGRIDTHPATGPTSSKHQKKSKLHGATETSGCSGTTLTVEMDEELHYASLNFHGMNPSEDTSTEYSEVRTQ

SEQ ID NO: 309 - DNA, 843 bp, Artificial Sequence
  1-27 CD3-Fc + Leader
atgggatggagctgtatcatcctcttcttggtagcaacagctacaggtgtacactcccaagatggtaatgaagaaatgggtggtattacacagacaccatataaagtctccatctctggaaccacagtaatattgacatccggagagcccaaatcttgtgacaaaactcacacatgcccaccgtgcccagcacctgaactcctggggggaccgtcagtcttcctcttccccccaaaacccaaggacaccctcatgatctcccggacccctgaggtcacatgcgtggtggtggacgtgagccacgaagaccctgaggtcaagttcaactggtacgtggacggcgtggaggtgcataatgccaagacaaagccgcgggaggagcagtacaacagcacgtaccgtgtggtcagcgtcctcaccgtcctgcaccaggactggctgaatggcaaggagtacaagtgcaaggtctccaacaaagccctcccagcccccatcgagaaaaccatctccaaagccaaagggcagccccgagaaccacaggtgtacaccctgcccccatcccgggaggagatgaccaagaaccaggtcagcctgacctgcctggtcaaaggcttctatcccagcgacatcgccgtggagtgggagagcaatgggcagccggagaacaactacaagaccacgcctcccgtgctggactccgacggctccttcttcctctatagcaagctcaccgtggacaagagcaggtggcagcaggggaacgtcttctcatgctccgtgatgcatgaggctctgcacaaccactacacgcagaagagcctctccctgtccccgggtaaatag

SEQ ID NO: 310 - protein, 280 aa, Artificial Sequence
  1-27 CD3-Fc + Leader
MGWSCIILFLVATATGVHSQDGNEEMGGITQTPYKVSISGTTVILTSGEPKSCDKTHTCPPCPAPELLGGPSVFLFPPKPKDTLMISRTPEVTCVVVDVSHEDPEVKFNWYVDGVEVHNAKTKPREEQYNSTYRVVSVLTVLHQDWLNGKEYKCKVSNKALPAPIEKTISKAKGQPREPQVYTLPPSREEMTKNQVSLTCLVKGFYPSDIAVEWESNGQPENNYKTTPPVLDSDGSFFLYSKLTVDKSRWQQGNVFSCSVMHEALHNHYTQKSLSLSPGK

SEQ ID NO: 311 - protein, 505 aa, Artificial Sequence
  CD33 UD H2C HL x AF5 HL
EVQLVESGGGLVQPGGSLKLSCAASGFTFNKYAMNWVRQAPGKGLEWVARIRSKYNNYATYYADSVKDRFTISRDDSKNTAYLQMNNLKTEDTAVYYCVRHGNFGNSYISYWAYWGQGTLVTVSSGGGGSGGGGSGGGGSQTVVTQEPSLTVSPGGTVTLTCGSSTGAVTSGYYPNWVQQKPGQAPRGLIGGTKFLAPGTPARFSGSLLGGKAALTLSGVQPEDEAEYYCALWYSNRWVFGGGTKLTVLSGGGGSQVQLVQSGAEVKKPGASVKVSCKASGYTFTNYGMNWVKQAPGQGLKWMGWINTYTGEPTYADDFKGRVTMTSDTSTSTAYLELHNLRSDDTAVYYCARWSWSDGYYVYFDYWGQGTTVTVSSGGGGSGGGGSGGGGSDIVMTQSPDSLTVSLGERTTINCKSSQSVLDSSKNKNSLAWYQQKPGQPPKLLLSWASTRESGIPDRFSGSGSGTDFTLTIDSLQPEDSATYYCQQSAHFPITFGQGTRLEIK

SEQ ID NO: 312 - DNA, 1515 bp, Artificial Sequence
  CD33 UD H2C HL x AF5 HL
gaggtgcagctggtcgagtctggaggaggattggtgcagcctggagggtcattgaaactctcatgtgcagcctctggattcaccttcaataagtacgccatgaactgggtccgccaggctccaggaaagggtttggaatgggttgctcgcataagaagtaaatataataattatgcaacatattatgccgattcagtgaaagacaggttcaccatctccagagatgattcaaaaaacactgcctatctacaaatgaacaacttgaaaactgaggacactgccgtgtactactgtgtgagacatgggaacttcggtaatagctacatatcctactgggcttactggggccaagggactctggtcaccgtctcctcaggtggtggtggttctggcggcggcggctccggtggtggtggttctcagactgttgtgactcaggaaccttcactcaccgtatcacctggtggaacagtcacactcacttgtggctcctcgactggggctgttacatctggctactacccaaactgggtccaacaaaaaccaggtcaggcaccccgtggtctaataggtgggactaagttcctcgcccccggtactcctgccagattctcaggctccctgcttggaggcaaggctgccctcaccctctcaggggtacagccagaggatgaggcagaatattactgtgctctatggtacagcaaccgctgggtgttcggtggaggaaccaaactgactgtcctatccggaggtggtggctcccaggtgcagctggtccagtctggagctgaggtgaagaagcctggagcgtcagtcaaggtctcctgcaaggctagcgggtataccttcacaaactatggaatgaactgggtgaagcaggctccaggacagggtttaaagtggatgggctggataaacacctacactggagagccaacatatgctgatgacttcaagggacgggttaccatgacttcggatacctctaccagcactgcctatttggaactccacaacctcagaagtgatgacacggctgtatattactgtgcgcgctggagttggagtgatggttactacgtttactttgactactggggccaaggcactacggtcaccgtctcctcaggtggtggtggttctggcggcggcggctccggtggtggtggttctgacatcgtgatgacacagtctccagactccctgactgtgtctctgggcgagaggaccaccatcaactgcaagtccagccagagtgttttagacagctccaagaataagaactccttagcttggtaccagcagaaaccaggacagcctcctaaattactcctttcctgggcatctacgcgggaatccgggatccctgaccgattcagtggcagcgggtctgggacagatttcactctcactattgacagcctgcagcctgaagattctgcaacttactattgtcaacagtctgcccacttcccgatcacctttggccaagggacacgactggagattaaa

SEQ ID NO: 313 - protein, 505 aa, Artificial Sequence
  CD33 UD F12Q HL x AF5 HL
EVQLVESGGGLVQPGGSLKLSCAASGFTFNSYAMNWVRQAPGKGLEWVARIRSKYNNYATYYADSVKGRFTISRDDSKNTAYLQMNNLKTEDTAVYYCVRHGNFGNSYVSWWAYWGQGTLVTVSSGGGGSGGGGSGGGGSQTVVTQEPSLTVSPGGTVTLTCGSSTGAVTSGNYPNWVQQKPGQAPRGLIGGTKFLAPGTPARFSGSLLGGKAALTLSGVQPEDEAEYYCVLWYSNRWVFGGGTKLTVLSGGGGSQVQLVQSGAEVKKPGASVKVSCKASGYTFTNYGMNWVKQAPGQGLKWMGWINTYTGEPTYADDFKGRVTMTSDTSTSTAYLELHNLRSDDTAVYYCARWSWSDGYYVYFDYWGQGTTVTVSSGGGGSGGGGSGGGGSDIVMTQSPDSLTVSLGERTTINCKSSQSVLDSSKNKNSLAWYQQKPGQPPKLLLSWASTRESGIPDRFSGSGSGTDFTLTIDSLQPEDSATYYCQQSAHFPITFGQGTRLEIK

SEQ ID NO: 314 - DNA, 1515 bp, Artificial Sequence
  CD33 UD F12Q HL x AF5 HL
gaggtgcagctggtcgagtctggaggaggattggtgcagcctggagggtcattgaaactctcatgtgcagcctctggattcaccttcaatagctacgccatgaactgggtccgccaggctccaggaaagggtttggaatgggttgctcgcataagaagtaaatataataattatgcaacatattatgccgattcagtgaaaggcaggttcaccatctccagagatgattcaaaaaacactgcctatctacaaatgaacaacttgaaaactgaggacactgccgtgtactactgtgtgagacatgggaacttcggtaatagctacgtttcctggtgggcttactggggccaagggactctggtcaccgtctcctcaggtggtggtggttctggcggcggcggctccggtggtggtggttctcagactgttgtgactcaggaaccttcactcaccgtatcacctggtggaacagtcacactcacttgtggctcctcgactggggctgttacatctggcaactacccaaactgggtccaacaaaaaccaggtcaggcaccccgtggtctaataggtgggactaagttcctcgcccccggtactcctgccagattctcaggctccctgcttggaggcaaggctgccctcaccctctcaggggtacagccagaggatgaggcagaatattactgtgttctatggtacagcaaccgctgggtgttcggtggaggaaccaaactgactgtcctatccggaggtggtggctcccaggtgcagctggtccagtctggagctgaggtgaagaagcctggagcgtcagtcaaggtctcctgcaaggctagcgggtataccttcacaaactatggaatgaactgggtgaagcaggctccaggacagggtttaaagtggatgggctggataaacacctacactggagagccaacatatgctgatgacttcaagggacgggttaccatgacttcggatacctctaccagcactgcctatttggaactccacaacctcagaagtgatgacacggctgtatattactgtgcgcgctggagttggagtgatggttactacgtttactttgactactggggccaaggcactacggtcaccgtctcctcaggtggtggtggttctggcggcggcggctccggtggtggtggttctgacatcgtgatgacacagtctccagactccctgactgtgtctctgggcgagaggaccaccatcaactgcaagtccagccagagtgttttagacagctccaagaataagaactccttagcttggtaccagcagaaaccaggacagcctcctaaattactcctttcctgggcatctacgcgggaatccgggatccctgaccgattcagtggcagcgggtctgggacagatttcactctcactattgacagcctgcagcctgaagattctgcaacttactattgtcaacagtctgcccacttcccgatcacctttggccaagggacacgactggagattaaa

SEQ ID NO: 315 - protein, 505 aa, Artificial Sequence
  CD33 UD I2C HL x AF5 HL
EVQLVESGGGLVQPGGSLKLSCAASGFTFNKYAMNWVRQAPGKGLEWVARIRSKYNNYATYYADSVKDRFTISRDDSKNTAYLQMNNLKTEDTAVYYCVRHGNFGNSYISYWAYWGQGTLVTVSSGGGGSGGGGSGGGGSQTVVTQEPSLTVSPGGTVTLTCGSSTGAVTSGNYPNWVQQKPGQAPRGLIGGTKFLAPGTPARFSGSLLGGKAALTLSGVQPEDEAEYYCVLWYSNRWVFGGGTKLTVLSGGGGSQVQLVQSGAEVKKPGASVKVSCKASGYTFTNYGMNWVKQAPGQGLKWMGWINTYTGEPTYADDFKGRVTMTSDTSTSTAYLELHNLRSDDTAVYYCARWSWSDGYYVYFDYWGQGTTVTVSSGGGGSGGGGSGGGGSDIVMTQSPDSLTVSLGERTTINCKSSQSVLDSSKNKNSLAWYQQKPGQPPKLLLSWASTRESGIPDRFSGSGSGTDFTLTIDSLQPEDSATYYCQQSAHFPITFGQGTRLEIK

SEQ ID NO: 316 - DNA, 1515 bp, Artificial Sequence
  CD33 UD I2C HL x AF5 HL
gaggtgcagctggtcgagtctggaggaggattggtgcagcctggagggtcattgaaactctcatgtgcagcctctggattcaccttcaataagtacgccatgaactgggtccgccaggctccaggaaagggtttggaatgggttgctcgcataagaagtaaatataataattatgcaacatattatgccgattcagtgaaagacaggttcaccatctccagagatgattcaaaaaacactgcctatctacaaatgaacaacttgaaaactgaggacactgccgtgtactactgtgtgagacatgggaacttcggtaatagctacatatcctactgggcttactggggccaagggactctggtcaccgtctcctcaggtggtggtggttctggcggcggcggctccggtggtggtggttctcagactgttgtgactcaggaaccttcactcaccgtatcacctggtggaacagtcacactcacttgtggctcctcgactggggctgttacatctggcaactacccaaactgggtccaacaaaaaccaggtcaggcaccccgtggtctaataggtgggactaagttcctcgcccccggtactcctgccagattctcaggctccctgcttggaggcaaggctgccctcaccctctcaggggtacagccagaggatgaggcagaatattactgtgttctatggtacagcaaccgctgggtgttcggtggaggaaccaaactgactgtcctatccggaggtggtggctcccaggtgcagctggtccagtctggagctgaggtgaagaagcctggagcgtcagtcaaggtctcctgcaaggctagcgggtataccttcacaaactatggaatgaactgggtgaagcaggctccaggacagggtttaaagtggatgggctggataaacacctacactggagagccaacatatgctgatgacttcaagggacgggttaccatgacttcggatacctctaccagcactgcctatttggaactccacaacctcagaagtgatgacacggctgtatattactgtgcgcgctggagttggagtgatggttactacgtttactttgactactggggccaaggcactacggtcaccgtctcctcaggtggtggtggttctggcggcggcggctccggtggtggtggttctgacatcgtgatgacacagtctccagactccctgactgtgtctctgggcgagaggaccaccatcaactgcaagtccagccagagtgttttagacagctccaagaataagaactccttagcttggtaccagcagaaaccaggacagcctcctaaattactcctttcctgggcatctacgcgggaatccgggatccctgaccgattcagtggcagcgggtctgggacagatttcactctcactattgacagcctgcagcctgaagattctgcaacttactattgtcaacagtctgcccacttcccgatcacctttggccaagggacacgactggagattaaa

SEQ ID NO: 317 - protein, 500 aa, Artificial Sequence
  MCSP-A9 HL x H2C HL
QVQLVQSGAEVKKPGASVKVSCKASGYPFTGYYMHWVRQAPGQGLEWMGWINPNSGGTNYAQKFQGRVTITADESTSTAYMELSRLRSDDTAVYYCAKSWVSWFASWGQGTLVTVSSGGGGSGGGGSGGGGSDIVMTQSPDSLAVSLGERATINCKSSQSVLSSSNNKNYLNWYQQKPGQPPKLLIYWASTRESGVPDRFSGSGSGTDFTLTISSLQAEDVAVYYCQQHFNTPFAFGQGTKLEIKSGGGGSEVQLVESGGGLVQPGGSLKLSCAASGFTFNKYAMNWVRQAPGKGLEWVARIRSKYNNYATYYADSVKDRFTISRDDSKNTAYLQMNNLKTEDTAVYYCVRHGNFGNSYISYWAYWGQGTLVTVSSGGGGSGGGGSGGGGSQTVVTQEPSLTVSPGGTVTLTCGSSTGAVTSGYYPNWVQQKPGQAPRGLIGGTKFLAPGTPARFSGSLLGGKAALTLSGVQPEDEAEYYCALWYSNRWVFGGGTKLTVL

SEQ ID NO: 318 - DNA, 1500 bp, Artificial Sequence
  MCSP-A9 HL x H2C HL
caggtgcagctggtccagtctggggctgaggtgaagaagcctggggcctcagtgaaggtctcctgcaaggcttctggataccccttcaccggctactacatgcactgggtgcgacaggcccctggacaagggcttgagtggatgggatggatcaaccctaacagtggtggcacaaactatgcacagaagtttcagggcagagtcacgattaccgcggacgaatccacgagcacagcctacatggagctgagcaggctgagatctgacgacacggccgtgtattactgtgcgaaatcctgggtctcctggtttgcttcctggggtcaaggaaccttggtcaccgtctcctcaggtggtggtggttctggcggcggcggctccggtggtggtggttctgacatcgtgatgacacagtctccagactccctggctgtgtctctgggcgagagggccaccatcaactgcaagtccagccagagtgtcttatccagctccaacaataagaactacttaaattggtaccagcagaaaccaggacagcctcctaagttgctcatttactgggcatctacccgggaatccggggtccctgaccgattcagtggcagcgggtctgggacagatttcactctcaccatcagcagcctgcaggctgaagatgtggcggtttattactgtcaacaacattttaatactccgttcgcttttggccaggggaccaagctggagatcaaatccggaggtggtggatccgaggtgcagctggtcgagtctggaggaggattggtgcagcctggagggtcattgaaactctcatgtgcagcctctggattcaccttcaataagtacgccatgaactgggtccgccaggctccaggaaagggtttggaatgggttgctcgcataagaagtaaatataataattatgcaacatattatgccgattcagtgaaagacaggttcaccatctccagagatgattcaaaaaacactgcctatctacaaatgaacaacttgaaaactgaggacactgccgtgtactactgtgtgagacatgggaacttcggtaatagctacatatcctactgggcttactggggccaagggactctggtcaccgtctcctcaggtggtggtggttctggcggcggcggctccggtggtggtggttctcagactgttgtgactcaggaaccttcactcaccgtatcacctggtggaacagtcacactcacttgtggctcctcgactggggctgttacatctggctactacccaaactgggtccaacaaaaaccaggtcaggcaccccgtggtctaataggtgggactaagttcctcgcccccggtactcctgccagattctcaggctccctgcttggaggcaaggctgccctcaccctctcaggggtacagccagaggatgaggcagaatattactgtgctctatggtacagcaaccgctgggtgttcggtggaggaaccaaactgactgtccta

SEQ ID NO: 319 - protein, 500 aa, Artificial Sequence
  MCSP-A9 HL x F12Q HL
QVQLVQSGAEVKKPGASVKVSCKASGYPFTGYYMHWVRQAPGQGLEWMGWINPNSGGTNYAQKFQGRVTITADESTSTAYMELSRLRSDDTAVYYCAKSWVSWFASWGQGTLVTVSSGGGGSGGGGSGGGGSDIVMTQSPDSLAVSLGERATINCKSSQSVLSSSNNKNYLNWYQQKPGQPPKLLIYWASTRESGVPDRFSGSGSGTDFTLTISSLQAEDVAVYYCQQHFNTPFAFGQGTKLEIKSGGGGSEVQLVESGGGLVQPGGSLKLSCAASGFTFNSYAMNWVRQAPGKGLEWVARIRSKYNNYATYYADSVKGRFTISRDDSKNTAYLQMNNLKTEDTAVYYCVRHGNFGNSYVSWWAYWGQGTLVTVSSGGGGSGGGGSGGGGSQTVVTQEPSLTVSPGGTVTLTCGSSTGAVTSGNYPNWVQQKPGQAPRGLIGGTKFLAPGTPARFSGSLLGGKAALTLSGVQPEDEAEYYCVLWYSNRWVFGGGTKLTVL

SEQ ID NO: 320 - DNA, 1500 bp, Artificial Sequence
  MCSP-A9 HL x F12Q HL
caggtgcagctggtccagtctggggctgaggtgaagaagcctggggcctcagtgaaggtctcctgcaaggcttctggataccccttcaccggctactacatgcactgggtgcgacaggcccctggacaagggcttgagtggatgggatggatcaaccctaacagtggtggcacaaactatgcacagaagtttcagggcagagtcacgattaccgcggacgaatccacgagcacagcctacatggagctgagcaggctgagatctgacgacacggccgtgtattactgtgcgaaatcctgggtctcctggtttgcttcctggggtcaaggaaccttggtcaccgtctcctcaggtggtggtggttctggcggcggcggctccggtggtggtggttctgacatcgtgatgacacagtctccagactccctggctgtgtctctgggcgagagggccaccatcaactgcaagtccagccagagtgtcttatccagctccaacaataagaactacttaaattggtaccagcagaaaccaggacagcctcctaagttgctcatttactgggcatctacccgggaatccggggtccctgaccgattcagtggcagcgggtctgggacagatttcactctcaccatcagcagcctgcaggctgaagatgtggcggtttattactgtcaacaacattttaatactccgttcgcttttggccaggggaccaagctggagatcaaatccggaggtggtggatccgaggtgcagctggtcgagtctggaggaggattggtgcagcctggagggtcattgaaactctcatgtgcagcctctggattcaccttcaatagctacgccatgaactgggtccgccaggctccaggaaagggtttggaatgggttgctcgcataagaagtaaatataataattatgcaacatattatgccgattcagtgaaaggcaggttcaccatctccagagatgattcaaaaaacactgcctatctacaaatgaacaacttgaaaactgaggacactgccgtgtactactgtgtgagacatgggaacttcggtaatagctacgtttcctggtgggcttactggggccaagggactctggtcaccgtctcctcaggtggtggtggttctggcggcggcggctccggtggtggtggttctcagactgttgtgactcaggaaccttcactcaccgtatcacctggtggaacagtcacactcacttgtggctcctcgactggggctgttacatctggcaactacccaaactgggtccaacaaaaaccaggtcaggcaccccgtggtctaataggtgggactaagttcctcgcccccggtactcctgccagattctcaggctccctgcttggaggcaaggctgccctcaccctctcaggggtacagccagaggatgaggcagaatattactgtgttctatggtacagcaaccgctgggtgttcggtggaggaaccaaactgactgtccta

SEQ ID NO: 321 - protein, 500 aa, Artificial Sequence
  MCSP-A9 HL x I2C HL
QVQLVQSGAEVKKPGASVKVSCKASGYPFTGYYMHWVRQAPGQGLEWMGWINPNSGGTNYAQKFQGRVTITADESTSTAYMELSRLRSDDTAVYYCAKSWVSWFASWGQGTLVTVSSGGGGSGGGGSGGGGSDIVMTQSPDSLAVSLGERATINCKSSQSVLSSSNNKNYLNWYQQKPGQPPKLLIYWASTRESGVPDRFSGSGSGTDFTLTISSLQAEDVAVYYCQQHFNTPFAFGQGTKLEIKSGGGGSEVQLVESGGGLVQPGGSLKLSCAASGFTFNKYAMNWVRQAPGKGLEWVARIRSKYNNYATYYADSVKDRFTISRDDSKNTAYLQMNNLKTEDTAVYYCVRHGNFGNSYISYWAYWGQGTLVTVSSGGGGSGGGGSGGGGSQTVVTQEPSLTVSPGGTVTLTCGSSTGAVTSGNYPNWVQQKPGQAPRGLIGGTKFLAPGTPARFSGSLLGGKAALTLSGVQPEDEAEYYCVLWYSNRWVFGGGTKLTVL

SEQ ID NO: 322 - DNA, 1500 bp, Artificial Sequence
  MCSP-A9 HL x I2C HL
caggtgcagctggtccagtctggggctgaggtgaagaagcctggggcctcagtgaaggtctcctgcaaggcttctggataccccttcaccggctactacatgcactgggtgcgacaggcccctggacaagggcttgagtggatgggatggatcaaccctaacagtggtggcacaaactatgcacagaagtttcagggcagagtcacgattaccgcggacgaatccacgagcacagcctacatggagctgagcaggctgagatctgacgacacggccgtgtattactgtgcgaaatcctgggtctcctggtttgcttcctggggtcaaggaaccttggtcaccgtctcctcaggtggtggtggttctggcggcggcggctccggtggtggtggttctgacatcgtgatgacacagtctccagactccctggctgtgtctctgggcgagagggccaccatcaactgcaagtccagccagagtgtcttatccagctccaacaataagaactacttaaattggtaccagcagaaaccaggacagcctcctaagttgctcatttactgggcatctacccgggaatccggggtccctgaccgattcagtggcagcgggtctgggacagatttcactctcaccatcagcagcctgcaggctgaagatgtggcggtttattactgtcaacaacattttaatactccgttcgcttttggccaggggaccaagctggagatcaaatccggaggtggtggatccgaggtgcagctggtcgagtctggaggaggattggtgcagcctggagggtcattgaaactctcatgtgcagcctctggattcaccttcaataagtacgccatgaactgggtccgccaggctccaggaaagggtttggaatgggttgctcgcataagaagtaaatataataattatgcaacatattatgccgattcagtgaaagacaggttcaccatctccagagatgattcaaaaaacactgcctatctacaaatgaacaacttgaaaactgaggacactgccgtgtactactgtgtgagacatgggaacttcggtaatagctacatatcctactgggcttactggggccaagggactctggtcaccgtctcctcaggtggtggtggttctggcggcggcggctccggtggtggtggttctcagactgttgtgactcaggaaccttcactcaccgtatcacctggtggaacagtcacactcacttgtggctcctcgactggggctgttacatctggcaactacccaaactgggtccaacaaaaaccaggtcaggcaccccgtggtctaataggtgggactaagttcctcgcccccggtactcctgccagattctcaggctccctgcttggaggcaaggctgccctcaccctctcaggggtacagccagaggatgaggcagaatattactgtgttctatggtacagcaaccgctgggtgttcggtggaggaaccaaactgactgtccta

SEQ ID NO: 323 - protein, 500 aa, Artificial Sequence
  MCSP-C8 HL x I2C HL
QVQLVQSGAEVKRPGASMKVSCKASGYTFTNYYIHWVRQAPGQGLEWMGWINPNSGATNYAQKFQGRVTMTRDTSTSTVYMELSSLRSEDTAVYYCAKSWVSWFASWGQGTLVTVSSGGGGSGGGGSGGGGSDIVMTQSPDSLAVSLGERATINCKSSQSVLNSKNNRNYLAWYQQKPGQPPKLLIYWASTRESGVPDRFSGSGSGTDFTLTISGLQAEDVAVYYCQQHYSTPFTFGPGTKVDIKSGGGGSEVQLVESGGGLVQPGGSLKLSCAASGFTFNKYAMNWVRQAPGKGLEWVARIRSKYNNYATYYADSVKDRFTISRDDSKNTAYLQMNNLKTEDTAVYYCVRHGNFGNSYISYWAYWGQGTLVTVSSGGGGSGGGGSGGGGSQTVVTQEPSLTVSPGGTVTLTCGSSTGAVTSGNYPNWVQQKPGQAPRGLIGGTKFLAPGTPARFSGSLLGGKAALTLSGVQPEDEAEYYCVLWYSNRWVFGGGTKLTVL

SEQ ID NO: 324 - DNA, 1500 bp, Artificial Sequence
  MCSP-C8 HL x I2C HL
caggtgcagctggtccagtctggggctgaggtgaagaggcctggggcctcaatgaaggtctcctgcaaggcttctgggtacaccttcaccaactactatatacactgggtgcgacaggcccctggacaaggtcttgagtggatgggttggatcaaccctaacagtggtgccacaaactatgcacagaagttccagggcagagtcaccatgaccagggacacgtccacgagcacagtctacatggagctgagcagcctgagatctgaggacacggccgtgtattactgtgcgaaatcctgggtctcctggtttgcttcctggggtcaaggaaccttggtcaccgtctcctcaggtggtggtggttctggcggcggcggctccggtggtggtggttctgacatcgtgatgacccagtctccagactccctggctgtgtctctgggcgagagggccaccatcaactgcaagtccagccagagtgttttaaacagcaagaacaataggaactacttagcttggtaccagcagaaaccaggacagcctcctaagctgctcatttactgggcatctacccgggaatccggggtccctgaccgattcagtggcagcgggtctgggacagatttcactctcaccatcagtggcctgcaggctgaagatgtggcagtttattactgtcagcaacattatagtactccattcacttttggccctgggaccaaagtggatatcaaatccggaggtggtggatccgaggtgcagctggtcgagtctggaggaggattggtgcagcctggagggtcattgaaactctcatgtgcagcctctggattcaccttcaataagtacgccatgaactgggtccgccaggctccaggaaagggtttggaatgggttgctcgcataagaagtaaatataataattatgcaacatattatgccgattcagtgaaagacaggttcaccatctccagagatgattcaaaaaacactgcctatctacaaatgaacaacttgaaaactgaggacactgccgtgtactactgtgtgagacatgggaacttcggtaatagctacatatcctactgggcttactggggccaagggactctggtcaccgtctcctcaggtggtggtggttctggcggcggcggctccggtggtggtggttctcagactgttgtgactcaggaaccttcactcaccgtatcacctggtggaacagtcacactcacttgtggctcctcgactggggctgttacatctggcaactacccaaactgggtccaacaaaaaccaggtcaggcaccccgtggtctaataggtgggactaagttcctcgcccccggtactcctgccagattctcaggctccctgcttggaggcaaggctgccctcaccctctcaggggtacagccagaggatgaggcagaatattactgtgttctatggtacagcaaccgctgggtgttcggtggaggaaccaaactgactgtccta

SEQ ID NO: 325 - protein, 500 aa, Artificial Sequence
  MCSP-B8 HL x I2C HL
QVQLVQSGAEVKRPGASMKVSCKASGYTFTNYYIHWVRQAPGQGLEWMGWINPNSGATNYAQKFQGRVTMTRDTSTSTVYMELSSLRSEDTAVYYCAKSWVSWFASWGQGTLVTVSSGGGGSGGGGSGGGGSDIVMTQSPDSLTVSPGERATINCKSSQSVLNSKNNRNYLAWYQQKPGQPPKLLIYWASTRESGVPDRFSGSGSGTDFTLTIDSLQPEDSATYYCQQHYSTPFTFGQGTRLEIKSGGGGSEVQLVESGGGLVQPGGSLKLSCAASGFTFNKYAMNWVRQAPGKGLEWVARIRSKYNNYATYYADSVKDRFTISRDDSKNTAYLQMNNLKTEDTAVYYCVRHGNFGNSYISYWAYWGQGTLVTVSSGGGGSGGGGSGGGGSQTVVTQEPSLTVSPGGTVTLTCGSSTGAVTSGNYPNWVQQKPGQAPRGLIGGTKFLAPGTPARFSGSLLGGKAALTLSGVQPEDEAEYYCVLWYSNRWVFGGGTKLTVL

SEQ ID NO: 326 - DNA, 1500 bp, Artificial Sequence
  MCSP-B8 HL x I2C HL
caggtgcagctggtccagtctggggctgaggtgaagaggcctggggcctcaatgaaggtctcctgcaaggcttctgggtacaccttcaccaactactatatacactgggtgcgacaggcccctggacaaggtcttgagtggatgggttggatcaaccctaacagtggtgccacaaactatgcacagaagttccagggcagagtcaccatgaccagggacacgtccacgagcacagtctacatggagctgagcagcctgagatctgaggacacggccgtgtattactgtgcgaaatcctgggtctcctggtttgcttcctggggtcaaggaaccttggtcaccgtctcctcaggtggtggtggttctggcggcggcggctccggtggtggtggttctgacatcgtgatgacccagtctccagactccctgactgtgtctccgggcgagagggccaccatcaactgcaagtccagccagagtgttttaaacagcaagaacaataggaactacttagcttggtaccagcagaaaccaggacagcctcctaagctgctcatttactgggcatctacccgggaatccggggtccctgaccgattcagtggcagcgggtctgggacagatttcactctcaccatcgattccctgcagcctgaagatagtgcaacttattactgtcagcaacattatagtactccattcacttttggccaggggaccagactggagatcaaatccggaggtggtggatccgaggtgcagctggtcgagtctggaggaggattggtgcagcctggagggtcattgaaactctcatgtgcagcctctggattcaccttcaataagtacgccatgaactgggtccgccaggctccaggaaagggtttggaatgggttgctcgcataagaagtaaatataataattatgcaacatattatgccgattcagtgaaagacaggttcaccatctccagagatgattcaaaaaacactgcctatctacaaatgaacaacttgaaaactgaggacactgccgtgtactactgtgtgagacatgggaacttcggtaatagctacatatcctactgggcttactggggccaagggactctggtcaccgtctcctcaggtggtggtggttctggcggcggcggctccggtggtggtggttctcagactgttgtgactcaggaaccttcactcaccgtatcacctggtggaacagtcacactcacttgtggctcctcgactggggctgttacatctggcaactacccaaactgggtccaacaaaaaccaggtcaggcaccccgtggtctaataggtgggactaagttcctcgcccccggtactcctgccagattctcaggctccctgcttggaggcaaggctgccctcaccctctcaggggtacagccagaggatgaggcagaatattactgtgttctatggtacagcaaccgctgggtgttcggtggaggaaccaaactgactgtccta

SEQ ID NO: 327 - protein, 500 aa, Artificial Sequence
  MCSP-B7 HL x I2C HL
QVQLVQSGAEVKRPGASMKVSCKASGYTFTNYYIHWVRQAPGQGLEWMGWINPNSGATNYAQKFQGRVTMTRDTSTSTVYMELSSLRSEDTAVYYCAKSWVSWFASWGQGTLVTVSSGGGGSGGGGSGGGGSDIVMTQSPDSLTVSLGERTTINCKSSQSVLNSKNNRNYLAWYQQKPGQPPKLLIYWASTRESGVPDRFSGSGSGTDFTLTIDSLQPEDIATYYCQQHYSTPFTFGQGTRLEIKSGGGGSEVQLVESGGGLVQPGGSLKLSCAASGFTFNKYAMNWVRQAPGKGLEWVARIRSKYNNYATYYADSVKDRFTISRDDSKNTAYLQMNNLKTEDTAVYYCVRHGNFGNSYISYWAYWGQGTLVTVSSGGGGSGGGGSGGGGSQTVVTQEPSLTVSPGGTVTLTCGSSTGAVTSGNYPNWVQQKPGQAPRGLIGGTKFLAPGTPARFSGSLLGGKAALTLSGVQPEDEAEYYCVLWYSNRWVFGGGTKLTVL

SEQ ID NO: 328 - DNA, 1500 bp, Artificial Sequence
  MCSP-B7 HL x I2C HL
caggtgcagctggtccagtctggggctgaggtgaagaggcctggggcctcaatgaaggtctcctgcaaggcttctgggtacaccttcaccaactactatatacactgggtgcgacaggcccctggacaaggtcttgagtggatgggttggatcaaccctaacagtggtgccacaaactatgcacagaagttccagggcagagtcaccatgaccagggacacgtccacgagcacagtctacatggagctgagcagcctgagatctgaggacacggccgtgtattactgtgcgaaatcctgggtctcctggtttgcttcctggggtcaaggaaccttggtcaccgtctcctcaggtggtggtggttctggcggcggcggctccggtggtggtggttctgacatcgtgatgacccagtctccagactccctgactgtgtctctgggcgagaggaccaccatcaactgcaagtccagccagagtgttttaaacagcaagaacaataggaactacttagcttggtaccagcagaaaccaggacagcctcctaagctgctcatttactgggcatctacccgggaatccggggtccctgaccgattcagtggcagcgggtctgggacagatttcactctcaccatcgattccctgcagcctgaagatattgcaacttattactgtcagcaacattatagtactccattcacttttggccaggggaccagactggagatcaaatccggaggtggtggatccgaggtgcagctggtcgagtctggaggaggattggtgcagcctggagggtcattgaaactctcatgtgcagcctctggattcaccttcaataagtacgccatgaactgggtccgccaggctccaggaaagggtttggaatgggttgctcgcataagaagtaaatataataattatgcaacatattatgccgattcagtgaaagacaggttcaccatctccagagatgattcaaaaaacactgcctatctacaaatgaacaacttgaaaactgaggacactgccgtgtactactgtgtgagacatgggaacttcggtaatagctacatatcctactgggcttactggggccaagggactctggtcaccgtctcctcaggtggtggtggttctggcggcggcggctccggtggtggtggttctcagactgttgtgactcaggaaccttcactcaccgtatcacctggtggaacagtcacactcacttgtggctcctcgactggggctgttacatctggcaactacccaaactgggtccaacaaaaaccaggtcaggcaccccgtggtctaataggtgggactaagttcctcgcccccggtactcctgccagattctcaggctccctgcttggaggcaaggctgccctcaccctctcaggggtacagccagaggatgaggcagaatattactgtgttctatggtacagcaaccgctgggtgttcggtggaggaaccaaactgactgtccta

SEQ ID NO: 329 - protein, 500 aa, Artificial Sequence
  MCSP-G8 HL x I2C HL
QVQLVQSGAEVKRPGASMKVSCKASGYTFTNYYIHWVRQAPGQGLEWMGWINPNSGATNYAQKFQGRVTMTRDTSTSTVYMELSSLRSEDTAVYYCAKSWVSWFASWGQGTLVTVSSGGGGSGGGGSGGGGSDIVMTQSPDSLTVSLGERATINCKSSQSVLNSKNNRNYLAWYQQKPGQPPKLLIYWASTRESGVPDRFSGSGSGTDFTLTIDSLQPEDSATYYCQQHYSTPFTFGQGTRLEIKSGGGGSEVQLVESGGGLVQPGGSLKLSCAASGFTFNKYAMNWVRQAPGKGLEWVARIRSKYNNYATYYADSVKDRFTISRDDSKNTAYLQMNNLKTEDTAVYYCVRHGNFGNSYISYWAYWGQGTLVTVSSGGGGSGGGGSGGGGSQTVVTQEPSLTVSPGGTVTLTCGSSTGAVTSGNYPNWVQQKPGQAPRGLIGGTKFLAPGTPARFSGSLLGGKAALTLSGVQPEDEAEYYCVLWYSNRWVFGGGTKLTVL

SEQ ID NO: 330 - DNA, 1500 bp, Artificial Sequence
  MCSP-G8 HL x I2C HL
caggtgcagctggtccagtctggggctgaggtgaagaggcctggggcctcaatgaaggtctcctgcaaggcttctgggtacaccttcaccaactactatatacactgggtgcgacaggcccctggacaaggtcttgagtggatgggttggatcaaccctaacagtggtgccacaaactatgcacagaagttccagggcagagtcaccatgaccagggacacgtccacgagcacagtctacatggagctgagcagcctgagatctgaggacacggccgtgtattactgtgcgaaatcctgggtctcctggtttgcttcctggggtcaaggaaccttggtcaccgtctcctcaggtggtggtggttctggcggcggcggctccggtggtggtggttctgacatcgtgatgacccagtctccagactccctgactgtgtctctgggcgagagggccaccatcaactgcaagtccagccagagtgttttaaacagcaagaacaataggaactacttagcttggtaccagcagaaaccaggacagcctcctaagctgctcatttactgggcatctacccgggaatccggggtccctgaccgattcagtggcagcgggtctgggacagatttcactctcaccatcgattccctgcagcctgaagatagtgcaacttattactgtcagcaacattatagtactccattcacttttggccaggggaccagactggagatcaaatccggaggtggtggatccgaggtgcagctggtcgagtctggaggaggattggtgcagcctggagggtcattgaaactctcatgtgcagcctctggattcaccttcaataagtacgccatgaactgggtccgccaggctccaggaaagggtttggaatgggttgctcgcataagaagtaaatataataattatgcaacatattatgccgattcagtgaaagacaggttcaccatctccagagatgattcaaaaaacactgcctatctacaaatgaacaacttgaaaactgaggacactgccgtgtactactgtgtgagacatgggaacttcggtaatagctacatatcctactgggcttactggggccaagggactctggtcaccgtctcctcaggtggtggtggttctggcggcggcggctccggtggtggtggttctcagactgttgtgactcaggaaccttcactcaccgtatcacctggtggaacagtcacactcacttgtggctcctcgactggggctgttacatctggcaactacccaaactgggtccaacaaaaaccaggtcaggcaccccgtggtctaataggtgggactaagttcctcgcccccggtactcctgccagattctcaggctccctgcttggaggcaaggctgccctcaccctctcaggggtacagccagaggatgaggcagaatattactgtgttctatggtacagcaaccgctgggtgttcggtggaggaaccaaactgactgtccta

SEQ ID NO: 331 - protein, 500 aa, Artificial Sequence
  MCSP-D5 HL x I2C HL
QVQLVQSGAEVKRPGASMKVSCKASGYTFTNYYIHWVRQAPGQGLEWMGWINPNSGATNYAQKFQGRVTMTRDTSTSTVYMELSSLRSEDTAVYYCAKSWVSWFASWGQGTLVTVSSGGGGSGGGGSGGGGSDIVMTQSPDSLAVSLGERATINCKSSQSVLNSKNNRNYLAWYQQKPGQPPKLLIYWASTRESGVPDRFSGSGSGTDFTLTIDSLQAEDSATYYCQQHYSTPFTFGQGTRLEIKSGGGGSEVQLVESGGGLVQPGGSLKLSCAASGFTFNKYAMNWVRQAPGKGLEWVARIRSKYNNYATYYADSVKDRFTISRDDSKNTAYLQMNNLKTEDTAVYYCVRHGNFGNSYISYWAYWGQGTLVTVSSGGGGSGGGGSGGGGSQTVVTQEPSLTVSPGGTVTLTCGSSTGAVTSGNYPNWVQQKPGQAPRGLIGGTKFLAPGTPARFSGSLLGGKAALTLSGVQPEDEAEYYCVLWYSNRWVFGGGTKLTVL

SEQ ID NO: 332 - DNA, 1500 bp, Artificial Sequence
  MCSP-D5 HL x I2C HL
caggtgcagctggtccagtctggggctgaggtgaagaggcctggggcctcaatgaaggtctcctgcaaggcttctgggtacaccttcaccaactactatatacactgggtgcgacaggcccctggacaaggtcttgagtggatgggttggatcaaccctaacagtggtgccacaaactatgcacagaagttccagggcagagtcaccatgaccagggacacgtccacgagcacagtctacatggagctgagcagcctgagatctgaggacacggccgtgtattactgtgcgaaatcctgggtctcctggtttgcttcctggggtcaaggaaccttggtcaccgtctcctcaggtggtggtggttctggcggcggcggctccggtggtggtggttctgacatcgtgatgacccagtctccagactccctggctgtgtctctgggcgagagggccaccatcaactgcaagtccagccagagtgttttaaacagcaagaacaataggaactacttagcttggtaccagcagaaaccaggacagcctcctaagctgctcatttactgggcatctacccgggaatccggggtccctgaccgattcagtggcagcgggtctgggacagatttcactctcaccatcgattccctgcaggctgaagatagtgcaacttattactgtcagcaacattatagtactccattcacttttggccaggggaccagactggagatcaaatccggaggtggtggatccgaggtgcagctggtcgagtctggaggaggattggtgcagcctggagggtcattgaaactctcatgtgcagcctctggattcaccttcaataagtacgccatgaactgggtccgccaggctccaggaaagggtttggaatgggttgctcgcataagaagtaaatataataattatgcaacatattatgccgattcagtgaaagacaggttcaccatctccagagatgattcaaaaaacactgcctatctacaaatgaacaacttgaaaactgaggacactgccgtgtactactgtgtgagacatgggaacttcggtaatagctacatatcctactgggcttactggggccaagggactctggtcaccgtctcctcaggtggtggtggttctggcggcggcggctccggtggtggtggttctcagactgttgtgactcaggaaccttcactcaccgtatcacctggtggaacagtcacactcacttgtggctcctcgactggggctgttacatctggcaactacccaaactgggtccaacaaaaaccaggtcaggcaccccgtggtctaataggtgggactaagttcctcgcccccggtactcctgccagattctcaggctccctgcttggaggcaaggctgccctcaccctctcaggggtacagccagaggatgaggcagaatattactgtgttctatggtacagcaaccgctgggtgttcggtggaggaaccaaactgactgtccta

SEQ ID NO: 333 - protein, 500 aa, Artificial Sequence
  MCSP-F7 HL x I2C HL
QVQLVQSGAEVKRPGASMKVSCKASGYTFTNYYIHWVRQAPGQGLEWMGWINPNSGATNYAQKFQGRVTMTRDTSTSTVYMELSSLRSEDTAVYYCAKSWVSWFASWGQGTLVTVSSGGGGSGGGGSGGGGSDIVMTQSPDSLAVSLGERATINCKSSQSVLNSKNNRNYLAWYQQKPGQPPKLLIYWASTRESGVPDRFSGSGSGTDFTLTIDVLQPEDIATYYCQQHYSTPFTFGQGTRLEIKSGGGGSEVQLVESGGGLVQPGGSLKLSCAASGFTFNKYAMNWVRQAPGKGLEWVARIRSKYNNYATYYADSVKDRFTISRDDSKNTAYLQMNNLKTEDTAVYYCVRHGNFGNSYISYWAYWGQGTLVTVSSGGGGSGGGGSGGGGSQTVVTQEPSLTVSPGGTVTLTCGSSTGAVTSGNYPNWVQQKPGQAPRGLIGGTKFLAPGTPARFSGSLLGGKAALTLSGVQPEDEAEYYCVLWYSNRWVFGGGTKLTVL

SEQ ID NO: 334 - DNA, 1500 bp, Artificial Sequence
  MCSP-F7 HL x I2C HL
caggtgcagctggtccagtctggggctgaggtgaagaggcctggggcctcaatgaaggtctcctgcaaggcttctgggtacaccttcaccaactactatatacactgggtgcgacaggcccctggacaaggtcttgagtggatgggttggatcaaccctaacagtggtgccacaaactatgcacagaagttccagggcagagtcaccatgaccagggacacgtccacgagcacagtctacatggagctgagcagcctgagatctgaggacacggccgtgtattactgtgcgaaatcctgggtctcctggtttgcttcctggggtcaaggaaccttggtcaccgtctcctcaggtggtggtggttctggcggcggcggctccggtggtggtggttctgacatcgtgatgacccagtctccagactccctggctgtgtctctgggcgagagggccaccatcaactgcaagtccagccagagtgttttaaacagcaagaacaataggaactacttagcttggtaccagcagaaaccaggacagcctcctaagctgctcatttactgggcatctacccgggaatccggggtccctgaccgattcagtggcagcgggtctgggacagatttcactctcaccatcgatgtcctgcagcctgaagatattgcaacttattactgtcagcaacattatagtactccattcacttttggccaggggaccagactggagatcaaatccggaggtggtggatccgaggtgcagctggtcgagtctggaggaggattggtgcagcctggagggtcattgaaactctcatgtgcagcctctggattcaccttcaataagtacgccatgaactgggtccgccaggctccaggaaagggtttggaatgggttgctcgcataagaagtaaatataataattatgcaacatattatgccgattcagtgaaagacaggttcaccatctccagagatgattcaaaaaacactgcctatctacaaatgaacaacttgaaaactgaggacactgccgtgtactactgtgtgagacatgggaacttcggtaatagctacatatcctactgggcttactggggccaagggactctggtcaccgtctcctcaggtggtggtggttctggcggcggcggctccggtggtggtggttctcagactgttgtgactcaggaaccttcactcaccgtatcacctggtggaacagtcacactcacttgtggctcctcgactggggctgttacatctggcaactacccaaactgggtccaacaaaaaccaggtcaggcaccccgtggtctaataggtgggactaagttcctcgcccccggtactcctgccagattctcaggctccctgcttggaggcaaggctgccctcaccctctcaggggtacagccagaggatgaggcagaatattactgtgttctatggtacagcaaccgctgggtgttcggtggaggaaccaaactgactgtccta

SEQ ID NO: 335 - protein, 500 aa, Artificial Sequence
  MCSP-G5 HL x I2C HL
QVQLVQSGAEVKRPGASMKVSCKASGYTFTNYYIHWVRQAPGQGLEWMGWINPNSGATNYAQKFQGRVTMTRDTSTSTVYMELSSLRSEDTAVYYCAKSWVSWFASWGQGTLVTVSSGGGGSGGGGSGGGGSDIVMTQSPDSLAVSLGDRATINCKSSQSVLNSKNNRNYLAWYQQKPGQPPKLLIYWASTRESGVPDRFSGSGSGTDFTLTIDSLQPEDSATYYCQQHYSTPFTFGQGTRLEIKSGGGGSEVQLVESGGGLVQPGGSLKLSCAASGFTFNKYAMNWVRQAPGKGLEWVARIRSKYNNYATYYADSVKDRFTISRDDSKNTAYLQMNNLKTEDTAVYYCVRHGNFGNSYISYWAYWGQGTLVTVSSGGGGSGGGGSGGGGSQTVVTQEPSLTVSPGGTVTLTCGSSTGAVTSGNYPNWVQQKPGQAPRGLIGGTKFLAPGTPARFSGSLLGGKAALTLSGVQPEDEAEYYCVLWYSNRWVFGGGTKLTVL

SEQ ID NO: 336 - DNA, 1500 bp, Artificial Sequence
  MCSP-G5 HL x I2C HL
caggtgcagctggtccagtctggggctgaggtgaagaggcctggggcctcaatgaaggtctcctgcaaggcttctgggtacaccttcaccaactactatatacactgggtgcgacaggcccctggacaaggtcttgagtggatgggttggatcaaccctaacagtggtgccacaaactatgcacagaagttccagggcagagtcaccatgaccagggacacgtccacgagcacagtctacatggagctgagcagcctgagatctgaggacacggccgtgtattactgtgcgaaatcctgggtctcctggtttgcttcctggggtcaaggaaccttggtcaccgtctcctcaggtggtggtggttctggcggcggcggctccggtggtggtggttctgacatcgtgatgacccagtctccagactccctggctgtgtctctgggcgacagggccaccatcaactgcaagtccagccagagtgttttaaacagcaagaacaataggaactacttagcttggtaccagcagaaaccaggacagcctcctaagctgctcatttactgggcatctacccgggaatccggggtccctgaccgattcagtggcagcgggtctgggacagatttcactctcaccatcgattccctgcagcctgaggatagtgcaacttattactgtcagcaacattatagtactccattcacttttggccaggggaccagactggagatcaaatccggaggtggtggatccgaggtgcagctggtcgagtctggaggaggattggtgcagcctggagggtcattgaaactctcatgtgcagcctctggattcaccttcaataagtacgccatgaactgggtccgccaggctccaggaaagggtttggaatgggttgctcgcataagaagtaaatataataattatgcaacatattatgccgattcagtgaaagacaggttcaccatctccagagatgattcaaaaaacactgcctatctacaaatgaacaacttgaaaactgaggacactgccgtgtactactgtgtgagacatgggaacttcggtaatagctacatatcctactgggcttactggggccaagggactctggtcaccgtctcctcaggtggtggtggttctggcggcggcggctccggtggtggtggttctcagactgttgtgactcaggaaccttcactcaccgtatcacctggtggaacagtcacactcacttgtggctcctcgactggggctgttacatctggcaactacccaaactgggtccaacaaaaaccaggtcaggcaccccgtggtctaataggtgggactaagttcctcgcccccggtactcctgccagattctcaggctccctgcttggaggcaaggctgccctcaccctctcaggggtacagccagaggatgaggcagaatattactgtgttctatggtacagcaaccgctgggtgttcggtggaggaaccaaactgactgtccta

SEQ ID NO: 337 - protein, 500 aa, Artificial Sequence
  MCSP-F8 HL x I2C HL
QVQLVQSGAEVKRPGASMKVSCKASGYTFTNYYIHWVRQAPGQGLEWMGWINPNSGATNYAQKFQGRVTMTRDTSTSTVYMELSSLRSEDTAVYYCAKSWVSWFASWGQGTLVTVSSGGGGSGGGGSGGGGSDIVMTQSPDSLTVSLGERATINCKSSQSVLNSKNNRNYLAWYQQKPGQPPKLLIYWASTRESGVPDRFSGSGSGTDFTLTIDSLQAEDSAIYYCQQHYSTPFTFGQGTRLEIKSGGGGSEVQLVESGGGLVQPGGSLKLSCAASGFTFNKYAMNWVRQAPGKGLEWVARIRSKYNNYATYYADSVKDRFTISRDDSKNTAYLQMNNLKTEDTAVYYCVRHGNFGNSYISYWAYWGQGTLVTVSSGGGGSGGGGSGGGGSQTVVTQEPSLTVSPGGTVTLTCGSSTGAVTSGNYPNWVQQKPGQAPRGLIGGTKFLAPGTPARFSGSLLGGKAALTLSGVQPEDEAEYYCVLWYSNRWVFGGGTKLTVL

SEQ ID NO: 338 - DNA, 1500 bp, Artificial Sequence
  MCSP-F8 HL x I2C HL
caggtgcagctggtccagtctggggctgaggtgaagaggcctggggcctcaatgaaggtctcctgcaaggcttctgggtacaccttcaccaactactatatacactgggtgcgacaggcccctggacaaggtcttgagtggatgggttggatcaaccctaacagtggtgccacaaactatgcacagaagttccagggcagagtcaccatgaccagggacacgtccacgagcacagtctacatggagctgagcagcctgagatctgaggacacggccgtgtattactgtgcgaaatcctgggtctcctggtttgcttcctggggtcaaggaaccttggtcaccgtctcctcaggtggtggtggttctggcggcggcggctccggtggtggtggttctgacatcgtgatgacccagtctccagactccctgactgtgtctctgggcgagagggccaccatcaactgcaagtccagccagagtgttttaaacagcaagaacaataggaactacttagcttggtaccagcagaaaccaggacagcctcctaagctgctcatttactgggcatctacccgggaatccggggtccctgaccgattcagtggcagcgggtctgggacagatttcactctcaccatcgattccctgcaggctgaagatagtgcaatttattactgtcagcaacattatagtactccattcacttttggccaggggaccagactggagatcaaatccggaggtggtggatccgaggtgcagctggtcgagtctggaggaggattggtgcagcctggagggtcattgaaactctcatgtgcagcctctggattcaccttcaataagtacgccatgaactgggtccgccaggctccaggaaagggtttggaatgggttgctcgcataagaagtaaatataataattatgcaacatattatgccgattcagtgaaagacaggttcaccatctccagagatgattcaaaaaacactgcctatctacaaatgaacaacttgaaaactgaggacactgccgtgtactactgtgtgagacatgggaacttcggtaatagctacatatcctactgggcttactggggccaagggactctggtcaccgtctcctcaggtggtggtggttctggcggcggcggctccggtggtggtggttctcagactgttgtgactcaggaaccttcactcaccgtatcacctggtggaacagtcacactcacttgtggctcctcgactggggctgttacatctggcaactacccaaactgggtccaacaaaaaccaggtcaggcaccccgtggtctaataggtgggactaagttcctcgcccccggtactcctgccagattctcaggctccctgcttggaggcaaggctgccctcaccctctcaggggtacagccagaggatgaggcagaatattactgtgttctatggtacagcaaccgctgggtgttcggtggaggaaccaaactgactgtccta

SEQ ID NO: 339 - protein, 500 aa, Artificial Sequence
  MCSP-G10 HL x I2C HL
QVQLVQSGAEVKRPGASMKVSCKASGYTFTNYYIHWVRQAPGQGLEWMGWINPNSGATNYAQKFQGRVTMTRDTSTSTVYMELSSLRSEDTAVYYCAKSWVSWFASWGQGTLVTVSSGGGGSGGGGSGGGGSDIVMTQSPDSLAVSLGERATINCKSSQSVLSSSNNKNYLNWYQQKPGQPPKLLIYWASTRESGVPDRFSGSGSGTDFTLTISSLQAEDVAVYYCQQHFNTPFAFGQGTKLEIKSGGGGSEVQLVESGGGLVQPGGSLKLSCAASGFTFNKYAMNWVRQAPGKGLEWVARIRSKYNNYATYYADSVKDRFTISRDDSKNTAYLQMNNLKTEDTAVYYCVRHGNFGNSYISYWAYWGQGTLVTVSSGGGGSGGGGSGGGGSQTVVTQEPSLTVSPGGTVTLTCGSSTGAVTSGNYPNWVQQKPGQAPRGLIGGTKFLAPGTPARFSGSLLGGKAALTLSGVQPEDEAEYYCVLWYSNRWVFGGGTKLTVL

SEQ ID NO: 340 - DNA, 1500 bp, Artificial Sequence
  MCSP-G10 HL x I2C HL
caggtgcagctggtccagtctggggctgaggtgaagaggcctggggcctcaatgaaggtctcctgcaaggcttctgggtacaccttcaccaactactatatacactgggtgcgacaggcccctggacaaggtcttgagtggatgggttggatcaaccctaacagtggtgccacaaactatgcacagaagttccagggcagagtcaccatgaccagggacacgtccacgagcacagtctacatggagctgagcagcctgagatctgaggacacggccgtgtattactgtgcgaaatcctgggtctcctggtttgcttcctggggtcaaggaaccttggtcaccgtctcctcaggtggtggtggttctggcggcggcggctccggtggtggtggttctgacatcgtgatgacacagtctccagactccctggctgtgtctctgggcgagagggccaccatcaactgcaagtccagccagagtgtcttatccagctccaacaataagaactacttaaattggtaccagcagaaaccaggacagcctcctaagttgctcatttactgggcatctacccgggaatccggggtccctgaccgattcagtggcagcgggtctgggacagatttcactctcaccatcagcagcctgcaggctgaagatgtggcggtttattactgtcaacaacattttaatactccgttcgcttttggccaggggaccaagctggagatcaaatccggaggtggtggatccgaggtgcagctggtcgagtctggaggaggattggtgcagcctggagggtcattgaaactctcatgtgcagcctctggattcaccttcaataagtacgccatgaactgggtccgccaggctccaggaaagggtttggaatgggttgctcgcataagaagtaaatataataattatgcaacatattatgccgattcagtgaaagacaggttcaccatctccagagatgattcaaaaaacactgcctatctacaaatgaacaacttgaaaactgaggacactgccgtgtactactgtgtgagacatgggaacttcggtaatagctacatatcctactgggcttactggggccaagggactctggtcaccgtctcctcaggtggtggtggttctggcggcggcggctccggtggtggtggttctcagactgttgtgactcaggaaccttcactcaccgtatcacctggtggaacagtcacactcacttgtggctcctcgactggggctgttacatctggcaactacccaaactgggtccaacaaaaaccaggtcaggcaccccgtggtctaataggtgggactaagttcctcgcccccggtactcctgccagattctcaggctccctgcttggaggcaaggctgccctcaccctctcaggggtacagccagaggatgaggcagaatattactgtgttctatggtacagcaaccgctgggtgttcggtggaggaaccaaactgactgtccta

SEQ ID NO: 341 - protein, 8 aa, Homo sapiens
QDGNEEMG

SEQ ID NO: 342 - protein, 8 aa, Saimiri sciureus
QDGNEEIG

SEQ ID NO: 343 - DNA, 20 bp, Artificial Sequence
  Thioate-modified CpG-Oligonucleotide
tccatgacgttcctgatgct

SEQ ID NO: 344 - DNA, 28 bp, Artificial Sequence
  MVH1
gcaggtgcagctcgaggagtcaggacct

SEQ ID NO: 345 - DNA, 27 bp, Artificial Sequence
  MVH2
gaggtccagctcgagcagtctggacct

SEQ ID NO: 346 - DNA, 27 bp, Artificial Sequence
  MVH3
caggtccaactcgagcagcctggggct

SEQ ID NO: 347 - DNA, 27 bp, Artificial Sequence
  MVH4
gaggttcagctcgagcagtctggggca

SEQ ID NO: 348 - DNA, 28 bp, Artificial Sequence
  MVH5
gaaggtgaagctcgaggagtctggagga

SEQ ID NO: 349 - DNA, 27 bp, Artificial Sequence
  MVH6
gaggtgaagcttctcgagtctggaggt

SEQ ID NO: 350 - DNA, 27 bp, Artificial Sequence
  MVH7
gaagtgaagctcgaggagtctggggga

SEQ ID NO: 351 - DNA, 27 bp, Artificial Sequence
  MVH8
gaggttcagctcgagcagtctggagct

SEQ ID NO: 352 - DNA, 34 bp, Artificial Sequence
  MuVHBstEII
tgaggagacggtgaccgtggtcccttggccccag

SEQ ID NO: 353 - DNA, 32 bp, Artificial Sequence
  MUVK1
ccagttccgagctcgttgtgactcaggaatct

SEQ ID NO: 354 - DNA, 32 bp, Artificial Sequence
  MUVK2
ccagttccgagctcgtgttgacgcagccgccc

SEQ ID NO: 355 - DNA, 32 bp, Artificial Sequence
  MUVK3
ccagttccgagctcgtgctcacccagtctcca

SEQ ID NO: 356 - DNA, 32 bp, Artificial Sequence
  MUVK4
ccagttccgagctccagatgacccagtctcca

SEQ ID NO: 357 - DNA, 32 bp, Artificial Sequence
  MUVK5
ccagatgtgagctcgtgatgacccagactcca

SEQ ID NO: 358 - DNA, 32 bp, Artificial Sequence
  MUVK6
ccagatgtgagctcgtcatgacccagtctcca

SEQ ID NO: 359 - DNA, 32 bp, Artificial Sequence
  MUVK7
ccagttccgagctcgtgatgacacagtctcca

SEQ ID NO: 360 - DNA, 39 bp, Artificial Sequence
  MuVkHindIII/BsiW1
tggtgcactagtcgtacgtttgatctcaagcttggtccc

SEQ ID NO: 361 - DNA, 22 bp, Artificial Sequence
  forward primer
gatctggtctacaccatcgagc

SEQ ID NO: 362 - DNA, 24 bp, Artificial Sequence
  reverse primer
ggagctgctgctggctcagtgagg

SEQ ID NO: 363 - DNA, 23 bp, Artificial Sequence
  forward primer
ttccagctgagcatgtctgatgg

SEQ ID NO: 364 - DNA, 21 bp, Artificial Sequence
  reverse primer
cgatcagcatctgggcccagg

SEQ ID NO: 365 - DNA, 25 bp, Artificial Sequence
  forward primer
gtggagcagttcactcagcaggacc

SEQ ID NO: 366 - DNA, 22 bp, Artificial Sequence
  reverse primer
gccttcacacccagtactggcc

SEQ ID NO: 367 - DNA, 59 bp, Artificial Sequence
  forward primer
tcccgtacgagatctggatcccaattggatggcggactcgtgctgttctcacacagagg

SEQ ID NO: 368 - DNA, 45 bp, Artificial Sequence
  reverse primer
agtgggtcgactcacacccagtactggccattcttaagggcaggg

SEQ ID NO: 369 - DNA, 64 bp, Artificial Sequence
  forward primer
gaggaattcaccatgccgctgctgctactgctgcccctgctgtgggcaggggccctggctatgg

SEQ ID NO: 370 - DNA, 26 bp, Artificial Sequence
  reverse primer
gatttgtaactgtatttggtacttcc

SEQ ID NO: 371 - DNA, 21 bp, Artificial Sequence
  forward primer
attccgcctccttggggatcc

SEQ ID NO: 372 - DNA, 25 bp, Artificial Sequence
  reverse primer
gcataggagacattgagctggatgg

SEQ ID NO: 373 - DNA, 21 bp, Artificial Sequence
  forward primer
gcaccaacctgacctgtcagg

SEQ ID NO: 374 - DNA, 39 bp, Artificial Sequence
  reverse primer
agtgggtcgactcactgggtcctgacctctgagtattcg

SEQ ID NO: 375 - protein, 124 aa, Artificial Sequence
  V EGFR 3D-E8
EVQLLESGGGLVQAGGSLRLSCAASGRTFSTYTMAWFRQAPGKEREFVQGISRSDGGTYDADSVKGRFTISRDNAKNTVYLQMNSLKPEDTAVYFCAAASVKLVYVNPNRYSYWGQGTQVTVSS

SEQ ID NO: 376 - protein, 5 aa, Artificial Sequence
  V EGFR 3D-E8 CDR1
TYTMA

SEQ ID NO: 377 - protein, 17 aa, Artificial Sequence
  V EGFR 3D-E8 CDR2
GISRSDGGTYDADSVKG

SEQ ID NO: 378 - protein, 15 aa, Artificial Sequence
  V EGFR 3D-E8 CDR3
ASVKLVYVNPNRYSY

SEQ ID NO: 379 - DNA, 372 bp, Artificial Sequence
  EGFR 3D-E8
gaggtgcagctgctcgagagcggtggtggtctggttcaggcgggtggcagcctgcgtctgagctgtgcggcgagcggccgtacctttagcacctataccatggcgtggtttcgtcaggcaccgggcaaagaacgtgaatttgtgcagggcattagccgtagcgatggcggcacctatgatgcggatagcgtgaaaggccgttttaccattagccgtgataacgcgaaaaacaccgtgtatctgcagatgaacagcctgaaaccggaagataccgcggtgtatttttgcgcggcagcgagcgtgaaactggtgtatgtgaatccgaaccgttatagctattggggccagggcacccaggtgaccgttagctcc

SEQ ID NO: 380 - protein, 378 aa, Artificial Sequence
  EGFR 3D-E8 x I2C HL
EVQLLESGGGLVQAGGSLRLSCAASGRTFSTYTMAWFRQAPGKEREFVQGISRSDGGTYDADSVKGRFTISRDNAKNTVYLQMNSLKPEDTAVYFCAAASVKLVYVNPNRYSYWGQGTQVTVSSGGGGSEVQLVESGGGLVQPGGSLKLSCAASGFTFNKYAMNWVRQAPGKGLEWVARIRSKYNNYATYYADSVKDRFTISRDDSKNTAYLQMNNLKTEDTAVYYCVRHGNFGNSYISYWAYWGQGTLVTVSSGGGGSGGGGSGGGGSQTVVTQEPSLTVSPGGTVTLTCGSSTGAVTSGNYPNWVQQKPGQAPRGLIGGTKFLAPGTPARFSGSLLGGKAALTLSGVQPEDEAEYYCVLWYSNRWVFGGGTKLTVL

SEQ ID NO: 381 - DNA, 1134 bp, Artificial Sequence
  EGFR 3D-E8 x I2C HL
gaggtgcagctgctcgagagcggtggtggtctggttcaggcgggtggcagcctgcgtctgagctgtgcggcgagcggccgtacctttagcacctataccatggcgtggtttcgtcaggcaccgggcaaagaacgtgaatttgtgcagggcattagccgtagcgatggcggcacctatgatgcggatagcgtgaaaggccgttttaccattagccgtgataacgcgaaaaacaccgtgtatctgcagatgaacagcctgaaaccggaagataccgcggtgtatttttgcgcggcagcgagcgtgaaactggtgtatgtgaatccgaaccgttatagctattggggccagggcacccaggtgaccgttagctccggaggtggtggatccgaggtgcagctggtcgagtctggaggaggattggtgcagcctggagggtcattgaaactctcatgtgcagcctctggattcaccttcaataagtacgccatgaactgggtccgccaggctccaggaaagggtttggaatgggttgctcgcataagaagtaaatataataattatgcaacatattatgccgattcagtgaaagacaggttcaccatctccagagatgattcaaaaaacactgcctatctacaaatgaacaacttgaaaactgaggacactgccgtgtactactgtgtgagacatgggaacttcggtaatagctacatatcctactgggcttactggggccaagggactctggtcaccgtctcctcaggtggtggtggttctggcggcggcggctccggtggtggtggttctcagactgttgtgactcaggaaccttcactcaccgtatcacctggtggaacagtcacactcacttgtggctcctcgactggggctgttacatctggcaactacccaaactgggtccaacaaaaaccaggtcaggcaccccgtggtctaataggtgggactaagttcctcgcccccggtactcctgccagattctcaggctccctgcttggaggcaaggctgccctcaccctctcaggggtacagccagaggatgaggcagaatattactgtgttctatggtacagcaaccgctgggtgttcggtggaggaaccaaactgactgtccta

SEQ ID NO: 382 - protein, 378 aa, Artificial Sequence
  EGFR 3D-E8 x H2C HL
EVQLLESGGGLVQAGGSLRLSCAASGRTFSTYTMAWFRQAPGKEREFVQGISRSDGGTYDADSVKGRFTISRDNAKNTVYLQMNSLKPEDTAVYFCAAASVKLVYVNPNRYSYWGQGTQVTVSSGGGGSEVQLVESGGGLVQPGGSLKLSCAASGFTFNKYAMNWVRQAPGKGLEWVARIRSKYNNYATYYADSVKDRFTISRDDSKNTAYLQMNNLKTEDTAVYYCVRHGNFGNSYISYWAYWGQGTLVTVSSGGGGSGGGGSGGGGSQTVVTQEPSLTVSPGGTVTLTCGSSTGAVTSGYYPNWVQQKPGQAPRGLIGGTKFLAPGTPARFSGSLLGGKAALTLSGVQPEDEAEYYCALWYSNRWVFGGGTKLTVL

SEQ ID NO: 383 - DNA, 1134 bp, Artificial Sequence
  EGFR 3D-E8 x H2C HL
gaggtgcagctgctcgagagcggtggtggtctggttcaggcgggtggcagcctgcgtctgagctgtgcggcgagcggccgtacctttagcacctataccatggcgtggtttcgtcaggcaccgggcaaagaacgtgaatttgtgcagggcattagccgtagcgatggcggcacctatgatgcggatagcgtgaaaggccgttttaccattagccgtgataacgcgaaaaacaccgtgtatctgcagatgaacagcctgaaaccggaagataccgcggtgtatttttgcgcggcagcgagcgtgaaactggtgtatgtgaatccgaaccgttatagctattggggccagggcacccaggtgaccgttagctccggaggtggtggatccgaggtgcagctggtcgagtctggaggaggattggtgcagcctggagggtcattgaaactctcatgtgcagcctctggattcaccttcaataagtacgccatgaactgggtccgccaggctccaggaaagggtttggaatgggttgctcgcataagaagtaaatataataattatgcaacatattatgccgattcagtgaaagacaggttcaccatctccagagatgattcaaaaaacactgcctatctacaaatgaacaacttgaaaactgaggacactgccgtgtactactgtgtgagacatgggaacttcggtaatagctacatatcctactgggcttactggggccaagggactctggtcaccgtctcctcaggtggtggtggttctggcggcggcggctccggtggtggtggttctcagactgttgtgactcaggaaccttcactcaccgtatcacctggtggaacagtcacactcacttgtggctcctcgactggggctgttacatctggctactacccaaactgggtccaacaaaaaccaggtcaggcaccccgtggtctaataggtgggactaagttcctcgcccccggtactcctgccagattctcaggctccctgcttggaggcaaggctgccctcaccctctcaggggtacagccagaggatgaggcagaatattactgtgctctatggtacagcaaccgctgggtgttcggtggaggaaccaaactgactgtccta

SEQ ID NO: 384 - protein, 378 aa, Artificial Sequence
  EGFR 3D-E8 x F12Q HL
EVQLLESGGGLVQAGGSLRLSCAASGRTFSTYTMAWFRQAPGKEREFVQGISRSDGGTYDADSVKGRFTISRDNAKNTVYLQMNSLKPEDTAVYFCAAASVKLVYVNPNRYSYWGQGTQVTVSSGGGGSEVQLVESGGGLVQPGGSLKLSCAASGFTFNSYAMNWVRQAPGKGLEWVARIRSKYNNYATYYADSVKGRFTISRDDSKNTAYLQMNNLKTEDTAVYYCVRHGNFGNSYVSWWAYWGQGTLVTVSSGGGGSGGGGSGGGGSQTVVTQEPSLTVSPGGTVTLTCGSSTGAVTSGNYPNWVQQKPGQAPRGLIGGTKFLAPGTPARFSGSLLGGKAALTLSGVQPEDEAEYYCVLWYSNRWVFGGGTKLTVL

SEQ ID NO: 385 - DNA, 1134 bp, Artificial Sequence
  EGFR 3D-E8 x F12Q HL
gaggtgcagctgctcgagagcggtggtggtctggttcaggcgggtggcagcctgcgtctgagctgtgcggcgagcggccgtacctttagcacctataccatggcgtggtttcgtcaggcaccgggcaaagaacgtgaatttgtgcagggcattagccgtagcgatggcggcacctatgatgcggatagcgtgaaaggccgttttaccattagccgtgataacgcgaaaaacaccgtgtatctgcagatgaacagcctgaaaccggaagataccgcggtgtatttttgcgcggcagcgagcgtgaaactggtgtatgtgaatccgaaccgttatagctattggggccagggcacccaggtgaccgttagctccggaggtggtggatccgaggtgcagctggtcgagtctggaggaggattggtgcagcctggagggtcattgaaactctcatgtgcagcctctggattcaccttcaatagctacgccatgaactgggtccgccaggctccaggaaagggtttggaatgggttgctcgcataagaagtaaatataataattatgcaacatattatgccgattcagtgaaaggcaggttcaccatctccagagatgattcaaaaaacactgcctatctacaaatgaacaacttgaaaactgaggacactgccgtgtactactgtgtgagacatgggaacttcggtaatagctacgtttcctggtgggcttactggggccaagggactctggtcaccgtctcctcaggtggtggtggttctggcggcggcggctccggtggtggtggttctcagactgttgtgactcaggaaccttcactcaccgtatcacctggtggaacagtcacactcacttgtggctcctcgactggggctgttacatctggcaactacccaaactgggtccaacaaaaaccaggtcaggcaccccgtggtctaataggtgggactaagttcctcgcccccggtactcctgccagattctcaggctccctgcttggaggcaaggctgccctcaccctctcaggggtacagccagaggatgaggcagaatattactgtgttctatggtacagcaaccgctgggtgttcggtggaggaaccaaactgactgtccta

SEQ ID NO: 386 - protein, 124 aa, Artificial Sequence
  V EGFR 3D-D12
EVQLLESGGGSVQTGGSLRLTCAASGRTSRSYGMGWFRQAPGKEREFVSGISWRGDSTGYADSVKGRFTISRDNAKNTVDLQMNSLKPEDTAIYYCAAAAGSAWYGTLYEYDYWGQGTQVTVSS

SEQ ID NO: 387 - protein, 5 aa, Artificial Sequence
  V EGFR 3D-D12 CDR1
SYGMG

SEQ ID NO: 388 - protein, 17 aa, Artificial Sequence
  V EGFR 3D-D12 CDR2
GISWRGDSTGYADSVKG

SEQ ID NO: 389 - protein, 15 aa, Artificial Sequence
  V EGFR 3D-D12 CDR3
AAGSAWYGTLYEYDY

SEQ ID NO: 390 - DNA, 372 bp, Artificial Sequence
  V EGFR 3D-D12
gaggtgcagctgctcgagagcggtggtggtagcgtgcagaccggcggtagcctgcgtctgacctgtgcggcgagcggtcgtaccagccgtagctatggcatgggctggtttcgtcaggcaccgggcaaagaacgtgaatttgtgagcggcattagctggcgtggcgatagcaccggctatgcggatagcgtgaaaggccgttttaccattagccgtgataacgcgaaaaacaccgtggatctgcagatgaacagcctgaaaccggaagataccgcgatttattattgcgcggcagcggcgggtagcgcgtggtatggcaccctgtatgaatatgattattggggccagggcacccaggtgaccgttagctcc

SEQ ID NO: 391 - protein, 378 aa, Artificial Sequence
  V EGFR 3D-D12 x I2C HL
EVQLLESGGGSVQTGGSLRLTCAASGRTSRSYGMGWFRQAPGKEREFVSGISWRGDSTGYADSVKGRFTISRDNAKNTVDLQMNSLKPEDTAIYYCAAAAGSAWYGTLYEYDYWGQGTQVTVSSGGGGSEVQLVESGGGLVQPGGSLKLSCAASGFTFNKYAMNWVRQAPGKGLEWVARIRSKYNNYATYYADSVKDRFTISRDDSKNTAYLQMNNLKTEDTAVYYCVRHGNFGNSYISYWAYWGQGTLVTVSSGGGGSGGGGSGGGGSQTVVTQEPSLTVSPGGTVTLTCGSSTGAVTSGNYPNWVQQKPGQAPRGLIGGTKFLAPGTPARFSGSLLGGKAALTLSGVQPEDEAEYYCVLWYSNRWVFGGGTKLTVL

SEQ ID NO: 392 - DNA, 1134 bp, Artificial Sequence
  V EGFR 3D-D12 x I2C HL
gaggtgcagctgctcgagagcggtggtggtagcgtgcagaccggcggtagcctgcgtctgacctgtgcggcgagcggtcgtaccagccgtagctatggcatgggctggtttcgtcaggcaccgggcaaagaacgtgaatttgtgagcggcattagctggcgtggcgatagcaccggctatgcggatagcgtgaaaggccgttttaccattagccgtgataacgcgaaaaacaccgtggatctgcagatgaacagcctgaaaccggaagataccgcgatttattattgcgcggcagcggcgggtagcgcgtggtatggcaccctgtatgaatatgattattggggccagggcacccaggtgaccgttagctccggaggtggtggatccgaggtgcagctggtcgagtctggaggaggattggtgcagcctggagggtcattgaaactctcatgtgcagcctctggattcaccttcaataagtacgccatgaactgggtccgccaggctccaggaaagggtttggaatgggttgctcgcataagaagtaaatataataattatgcaacatattatgccgattcagtgaaagacaggttcaccatctccagagatgattcaaaaaacactgcctatctacaaatgaacaacttgaaaactgaggacactgccgtgtactactgtgtgagacatgggaacttcggtaatagctacatatcctactgggcttactggggccaagggactctggtcaccgtctcctcaggtggtggtggttctggcggcggcggctccggtggtggtggttctcagactgttgtgactcaggaaccttcactcaccgtatcacctggtggaacagtcacactcacttgtggctcctcgactggggctgttacatctggcaactacccaaactgggtccaacaaaaaccaggtcaggcaccccgtggtctaataggtgggactaagttcctcgcccccggtactcctgccagattctcaggctccctgcttggaggcaaggctgccctcaccctctcaggggtacagccagaggatgaggcagaatattactgtgttctatggtacagcaaccgctgggtgttcggtggaggaaccaaactgactgtccta

SEQ ID NO: 393 - protein, 378 aa, Artificial Sequence
  V EGFR 3D-D12 x H2C HL
EVQLLESGGGSVQTGGSLRLTCAASGRTSRSYGMGWFRQAPGKEREFVSGISWRGDSTGYADSVKGRFTISRDNAKNTVDLQMNSLKPEDTAIYYCAAAAGSAWYGTLYEYDYWGQGTQVTVSSGGGGSEVQLVESGGGLVQPGGSLKLSCAASGFTFNKYAMNWVRQAPGKGLEWVARIRSKYNNYATYYADSVKDRFTISRDDSKNTAYLQMNNLKTEDTAVYYCVRHGNFGNSYISYWAYWGQGTLVTVSSGGGGSGGGGSGGGGSQTVVTQEPSLTVSPGGTVTLTCGSSTGAVTSGYYPNWVQQKPGQAPRGLIGGTKFLAPGTPARFSGSLLGGKAALTLSGVQPEDEAEYYCALWYSNRWVFGGGTKLTVL

SEQ ID NO: 394 - DNA, 1134 bp, Artificial Sequence
  V EGFR 3D-D12 x H2C HL
gaggtgcagctgctcgagagcggtggtggtagcgtgcagaccggcggtagcctgcgtctgacctgtgcggcgagcggtcgtaccagccgtagctatggcatgggctggtttcgtcaggcaccgggcaaagaacgtgaatttgtgagcggcattagctggcgtggcgatagcaccggctatgcggatagcgtgaaaggccgttttaccattagccgtgataacgcgaaaaacaccgtggatctgcagatgaacagcctgaaaccggaagataccgcgatttattattgcgcggcagcggcgggtagcgcgtggtatggcaccctgtatgaatatgattattggggccagggcacccaggtgaccgttagctccggaggtggtggatccgaggtgcagctggtcgagtctggaggaggattggtgcagcctggagggtcattgaaactctcatgtgcagcctctggattcaccttcaataagtacgccatgaactgggtccgccaggctccaggaaagggtttggaatgggttgctcgcataagaagtaaatataataattatgcaacatattatgccgattcagtgaaagacaggttcaccatctccagagatgattcaaaaaacactgcctatctacaaatgaacaacttgaaaactgaggacactgccgtgtactactgtgtgagacatgggaacttcggtaatagctacatatcctactgggcttactggggccaagggactctggtcaccgtctcctcaggtggtggtggttctggcggcggcggctccggtggtggtggttctcagactgttgtgactcaggaaccttcactcaccgtatcacctggtggaacagtcacactcacttgtggctcctcgactggggctgttacatctggctactacccaaactgggtccaacaaaaaccaggtcaggcaccccgtggtctaataggtgggactaagttcctcgcccccggtactcctgccagattctcaggctccctgcttggaggcaaggctgccctcaccctctcaggggtacagccagaggatgaggcagaatattactgtgctctatggtacagcaaccgctgggtgttcggtggaggaaccaaactgactgtccta

SEQ ID NO: 395 - protein, 378 aa, Artificial Sequence
  V EGFR 3D-D12 x F12Q HL
EVQLLESGGGSVQTGGSLRLTCAASGRTSRSYGMGWFRQAPGKEREFVSGISWRGDSTGYADSVKGRFTISRDNAKNTVDLQMNSLKPEDTAIYYCAAAAGSAWYGTLYEYDYWGQGTQVTVSSGGGGSEVQLVESGGGLVQPGGSLKLSCAASGFTFNSYAMNWVRQAPGKGLEWVARIRSKYNNYATYYADSVKGRFTISRDDSKNTAYLQMNNLKTEDTAVYYCVRHGNFGNSYVSWWAYWGQGTLVTVSSGGGGSGGGGSGGGGSQTVVTQEPSLTVSPGGTVTLTCGSSTGAVTSGNYPNWVQQKPGQAPRGLIGGTKFLAPGTPARFSGSLLGGKAALTLSGVQPEDEAEYYCVLWYSNRWVFGGGTKLTVL

SEQ ID NO: 396 - DNA, 1134 bp, Artificial Sequence
  V EGFR 3D-D12 x F12Q HL
gaggtgcagctgctcgagagcggtggtggtagcgtgcagaccggcggtagcctgcgtctgacctgtgcggcgagcggtcgtaccagccgtagctatggcatgggctggtttcgtcaggcaccgggcaaagaacgtgaatttgtgagcggcattagctggcgtggcgatagcaccggctatgcggatagcgtgaaaggccgttttaccattagccgtgataacgcgaaaaacaccgtggatctgcagatgaacagcctgaaaccggaagataccgcgatttattattgcgcggcagcggcgggtagcgcgtggtatggcaccctgtatgaatatgattattggggccagggcacccaggtgaccgttagctccggaggtggtggatccgaggtgcagctggtcgagtctggaggaggattggtgcagcctggagggtcattgaaactctcatgtgcagcctctggattcaccttcaatagctacgccatgaactgggtccgccaggctccaggaaagggtttggaatgggttgctcgcataagaagtaaatataataattatgcaacatattatgccgattcagtgaaaggcaggttcaccatctccagagatgattcaaaaaacactgcctatctacaaatgaacaacttgaaaactgaggacactgccgtgtactactgtgtgagacatgggaacttcggtaatagctacgtttcctggtgggcttactggggccaagggactctggtcaccgtctcctcaggtggtggtggttctggcggcggcggctccggtggtggtggttctcagactgttgtgactcaggaaccttcactcaccgtatcacctggtggaacagtcacactcacttgtggctcctcgactggggctgttacatctggcaactacccaaactgggtccaacaaaaaccaggtcaggcaccccgtggtctaataggtgggactaagttcctcgcccccggtactcctgccagattctcaggctccctgcttggaggcaaggctgccctcaccctctcaggggtacagccagaggatgaggcagaatattactgtgttctatggtacagcaaccgctgggtgttcggtggaggaaccaaactgactgtccta

SEQ ID NO: 397 - protein, 126 aa, Artificial Sequence
  V CD3 3D-H11
EVQLLEEVQLVESGGGLVQPGGSLRLSCAASGFTFDDYGMSWVRQAPGKWLEWVSDISWNGGSTYYADSVKGRFTISRDNAENTLYLQMNSLKPDDTAVYYCAKMGEGGWGANDYWGQGTQVTVSS

SEQ ID NO: 398 - protein, 5 aa, Artificial Sequence
  V CD3 3D-H11 CDR1
DYGMS

SEQ ID NO: 399 - protein, 17 aa, Artificial Sequence
  V CD3 3D-H11 CDR2
DISWNGGSTYYADSVKG

SEQ ID NO: 400 - protein, 11 aa, Artificial Sequence
  V CD3 3D-H11 CDR3
MGEGGWGANDY

SEQ ID NO: 401 - DNA, 378 bp, Artificial Sequence
  V CD3 3D-H11
gaggtgcagctgctcgaggaggtgcagctggtggagtctgggggaggcttggtgcagcctggggggtctctgagactctcctgtgcagcctctggattcacttttgatgattatggcatgagctgggtccgacaggctccagggaagtggctggagtgggtctcagatattagctggaatggtggtagcacatactatgcagactccgtgaagggccggttcaccatctccagagacaacgccgagaacacgctgtatctgcaaatgaacagcctgaaacctgacgacacggccgtgtattactgtgcaaaaatgggtgaagggggatggggtgcaaatgactactggggccaggggacccaggtcaccgtctcctcc

SEQ ID NO: 402 - DNA, 34 bp, Artificial Sequence
  5' EGFR AG XbaI
ggtctagagcatgcgaccctccgggacggccggg

SEQ ID NO: 403 - DNA, 36 bp, Artificial Sequence
  3' EGFR AG SalI
ttttaagtcgactcatgctccaataaattcactgct

SEQ ID NO: 404 - DNA, 22 bp, Artificial Sequence
  Forward primer
cgctctgcccggcgagtcgggc

SEQ ID NO: 405 - DNA, 22 bp, Artificial Sequence
  Reverse primer
ccgtcttcctccatctcatagc

SEQ ID NO: 406 - DNA, 31 bp, Artificial Sequence
  Forward primer
acatccggaggtgacagatcacggctcgtgc

SEQ ID NO: 407 - DNA, 30 bp, Artificial Sequence
  Reverse primer
caggatatccgaacgatgtggcgccttcgc

SEQ ID NO: 408 - DNA, 35 bp, Artificial Sequence
  5'-VHHa-XhoI
ctgacgctcgaggaggtgcagctggtggagtctgg

SEQ ID NO: 409 - DNA, 35 bp, Artificial Sequence
  5'-VHHb-XhoI
ctgacgctcgagcaggtrcagctggtggagtctgg

SEQ ID NO: 410 - DNA, 35 bp, Artificial Sequence
  5'-VHHc-XhoI
ctgacgctcgagcaggtaaagctggaggagtctgg

SEQ ID NO: 411 - DNA, 35 bp, Artificial Sequence
  5'-VHHd-XhoI
ctgacgctcgaggatgtgcagctggtggagtctgg

SEQ ID NO: 412 - DNA, 35 bp, Artificial Sequence
  5'-VHHe-XhoI
ctgacgctcgaggccgtgcagctggtggattctgg

SEQ ID NO: 413 - DNA, 32 bp, Artificial Sequence
  5'-VHHf-XhoI
acgctcgaggcggtgcagctggtggagtctgg

SEQ ID NO: 414 - DNA, 34 bp, Artificial Sequence
  5'-VHH-LP-A-XhoI
ctgacgctcgaggaggtgcagctgcaggcgtctg

SEQ ID NO: 415 - DNA, 34 bp, Artificial Sequence
  5'-VHH-LP-B-XhoI
ctgacgctcgaggatgtscagctgcaggcgtctg

SEQ ID NO: 416 - DNA, 35 bp, Artificial Sequence
  5'-VHH-LX-I-XhoI
ctgacgctcgagcaggtgcagctggtgcagtctgg

SEQ ID NO: 417 - DNA, 35 bp, Artificial Sequence
  5'-VHH-LX-II-XhoI
ctgacgctcgagcaggtcaccttgaaggagtctgg

SEQ ID NO: 418 - DNA, 35 bp, Artificial Sequence
  5'-VHH-LX-III-XhoI
ctgacgctcgagcaggtgcagctgcaggagtcggg

SEQ ID NO: 419 - DNA, 32 bp, Artificial Sequence
  5'-VHH-LG-1-XhoI
ctgacgctcgagctgcagcagtctgggggagg

SEQ ID NO: 420 - DNA, 38 bp, Artificial Sequence
  3'-VHHG2-BsiWI-SpeI
ctgacgactagtcgtacgttggggtatcttgggttctg

SEQ ID NO: 421 - DNA, 40 bp, Artificial Sequence
  3'-VHHG3-BsiWI-SpeI
ctgacgactagtcgtacgtacttcattcgttcctgavgag

SEQ ID NO: 422 - DNA, 42 bp, Artificial Sequence
  3'-VHH-LP-G2a-BsiWI-SpeI
ctgacgactagtcgtacgttgtggttttggtgtcttgggttc

SEQ ID NO: 423 - DNA, 41 bp, Artificial Sequence
  3'-VHH-LP-dirA-BsiWI-SpeI
ctgacgactagtcgtacgtgaggagacggtgacctgggtcc

SEQ ID NO: 424 - DNA, 38 bp, Artificial Sequence
  3'-VHH-LG-dir1-BsiWI-SpeI
ctgacgactagtcgtacgggtgacctgggtcccctggc

SEQ ID NO: 425 - protein, 28 aa, Artificial Sequence
  N-termina 1-27 + additional C at position 28
QDGNEEMGGITQTPYKVSISGTTVILTC

SEQ ID NO: 426 - protein, 7 aa, Artificial Sequence
  Flag-tag
YKDDDDK

SEQ ID NO: 427 - protein, 27 aa, Macaca fascicularis
QDGNEEMGSITQTPYQVSISGTTILTC

SEQ ID NO: 428 - protein, 27 aa, Macaca fascicularis
QDGNEEMGSITQTPYQVSISGTTVILT

SEQ ID NO: 429 - protein, 27 aa, Macaca mulatta
QDGNEEMGSITQTPYHVSISGTTVILT
